United States Patent Application Publication US 2025/0325599 A1 - sequence listing, part 2

SEQ ID NO: 1 - DNA, 4188856 bp, Clostridium difficile (residues 2,094,429-4,188,856 of 4,188,856)
  source 1..4188856: mol_type = genomic DNA
cgttccttaaaagtgtcattctacatggcaatcgaggacaactatgtaaggaagaacctttttgatttccaactaagcgaagttattgaggacgccagtaggcccaaaaccgcattaagtaaagtacaggaagcaagactgctggacttatactctcatgcgtcagatgcagaaaatgcgaggtctgtagcatgatttacaacgatttgtacaacgactacgagtagaaatatatggagataagtattatctacgaaatcagaaaagaaatgacttgataatttactcatgttataattattgatgtgaaattaataaatcgaaattccttttttagatttaacaatactgagtaaggaaaaagtgaatgacttttgcaaggaggtgttaatatcaggcaaataaagtcttttgtttttccagttatatccttaatattcttagatcaaattagcaaagttcttataggattattcttaatggactttgaaattgatataattgggaaatttttaagattcaatcctgttcaaaatacaaaattaagtctctgctatctaacaaacggagcacaaaaatgaaaattaaatattaaatataaagcacagttaattttgattaaaaagttgactgtcttttcttttttataaatttaagcatgggtaataaagaaatgactgcatttaagcattatgtatataattggaggcaataaaaagccagcaaagcccataaaatagagctgtgctagcaacatgatgagttataagaagataatcaaaagcttacgctttattttaatttaaaaaaatgattactgtaaagaaatcattttttattataatcactgatacatcaaatattctaaataaaatttttatttatctggaattgtatattttttctataatattaactacagcgtacattgcccaagcacaaatagccaatacaaatactcccatcattactaaatctaatttaaatacttgagaaccatatactatcaagtagcctattccatatcttgaaactaaaaattctccaactattacacctacccatgccataccaatattaattttagttaaatttattaaatttcctgtgtttgcaggtaatatgagtttaaataatatttgagatttagtagctccaaagctttttaacatcttaattttttcttcatctatattcataaaataattataagctgaaagtatagtaacaacaacagaaatcgttacagctgttacgacgattccttctattccagcacctacccaaactataattataggagctaaagcagtcttaggaagagcatttaaaactaccaaaaatgggtctaatatttttgataatttttctgaccaccaaagagcaattgctaccaaaatacctaatacagtacctataacaagaccaagaacagtttcatatacagatattccaatatgtttaaataattgaccactaaatgcatattgaataaataaattgtaaatatcacttggtttgctaaatagaaatgtatttataacatttaagtcagctaaaagttcccagattacaataaaaccaattaaaattaatagctggtagaataatacatttcttttttctctttttacacctttaacatagtttatatatccttcagatcttttattaagcctcatgtgtatctagctccttccataatatgtcgaaatacttttgaaaatcaggaactttacgtgttttgagaggcgtttttgttccatccatgttaagttcaatatcgtaaatattttttatggtagctggtcttttagatagtattgcaaccttatctgatatgcttattgcttctgctatagctaaaaaagtgcaactaattgcttaaagaaacagaattatccacttcagcacccatataaacaatattaagatttcctaaactgctatcccaaatgatactattaataatagtagataataacaatctcttatcatctaaactggcattatcaacttcatcattaaatctcttcaaattactaacaataatatcaatattaatactgtcactactaatattgatattactagattccaaaatattaatcttatcctttaaaatactaatctcattatttaggctctcaatctgggaaactatataatcagaagcagtactaccagtattttttgcaagctctataactaaatttttaataagtctttccttatctaaaatttgatttttaagtaaattagtctcagatttaaaaatattaaaaacattatcagtcttaatgttattactattgaatgcacttataatagactcttctttacaattcttaattttatctataactaaactttcaactaatggaccattaagatttttacagttgcaactatcagacccaagtgtttttttagtaccacaaatataataatactttaaatccttgtcagtttttttgcctttataggtaattctcatattagaaccacatttaccacattttataagaccagataaaagagcagtttttccagttgatatccttggagttttatcacgatttttatctaattgattttgtacttcaagccatatttcaggttctatgactccatggtgttttgcaattgctgctattgagttagatgtatttttagcataggtaaggattccacattttctatctggagtacctacaacatccataccactatttttaaggtaatctaaaatttcatcattagcttttacatatgctggatttctaagtattctagataaagaactagggtcaaatttaccaccacgaggaccccttattccattattatagacatatttatataacttagataaggacctaagttctaaatatttattgtatattagctttacaatctccatttgttcatcatttacttgaagcttatacatacttctttcttttagattttcatctaagaatgtgattttttcactgttgaatccatgaggtgtattgcctccaagccatctaccactacgggctaattcatacatgttgtcttttatacgttctgctattgtttctctttctaattgagcaaatacacttgatataaacatcatagctcttcccattggagttgaagtatcaaattgttctttgatagatataaatgatatgtttagttcatttaatttttctattaaagtagagaagtcagatacatttctcgatatcctatctaatctataacaaactaggtaactaaatttcttatctttagcatcctgcatcattttcttaaattgtggtctatctatattgctaccactaaatccctcatcttcatatatcaaaaaatcttttacaccaatagactttgcataatcaatacataattgtatttgattttctatagaatcaccttttccagtaaatcttgattttcttgaataaattgcagctttcaaaattaaaacctcctataaattaggatatatatttgaaattatttatatacaaccttttaagtaaacttattagaataaatttattaattaggtaaatttatataattctactttttataatatatgactatttattttatttctttactattcaagttctaaatcaataataaattttgatatttaattgtatcaggacaaatctctaatttcatatattattaatataaaatcataggttagtgtgaaaaagttgaaatttaaatattttaaaagataattttttggaactaataggtataacaaaaatttatagggggattgcatatggaaatcaatgttatagaaattttccctaaagataaagctaaacttaataaaatagaaatggataaagctagttggtttgtaaatataataagtaaaaaatatcctaaagaagctttaaatgaagcatttagtattttagaaaaagaattaaatataagtaaagctaatacataagctttgattattgattttatatactattggttttatacgctatgacttgacattatattaatcaaatagtatatttttaaatatagcacaatgaagtgttaaaagagcaatggagctccatagataaagtctatggagcttttttgcgtatttaacttaaggaggatagagctttgaataactttgagattaaaactagaataaaatttggagaaggttcactaaaagttttgcaagaattaaaaaacaaaaatgtattaataataacagacccttttatggtgaaatcaaaaacaatagataaaataacatctaatttaataaactcaacatatcaagtttttgaagaaatagtaccagacccaccaatagaagtagtagtagcaggaatagaagcatttaaatctataaatccagacgtaataatagcattaggtggtggttctgcaatagatgcagcaaaatctataatggacttttctaaaaaaatattaaaaattaacgaagtagagtttatagcaataccaacaacaagtggaacaggttcagaagtaacatcatttgctgtaataacagatagtcaaaaaaaatgtaagtatccattagtgagtgatgatttacttccagatatggcaatactagacccagagcttgtaaaaactgtaccaaattttataacagcagatacagggatggatgtattgacacatgctatagaagcttacgtatctacaaattctaatgacttttcagatgcactagctgaaaaatctataaagttagtatttaaatacttaataaaagcatataaagatggaaatgacatagaagctcgagaaaaaatgcacaatgcatcttgtttagcaggtatggcatttaaccaagcatcacttggcataaatcattctattgcacatgtattaggtggaaaattccatataccacatggaagaacaaattctatattacttcctcatgtaatagaatataattcatcaatagtaggatatactaacacaacttactctgatacagctaaaaaatatgcacaaatagcagaattagtaggacttgggagtgctaatataagaatatctgttagaaatttagtaaatgaaataaagaaactacaaaaagaaatgaatatgccaactaaattgacacaatgcaaattaagtttagaagatataactaatgaagaaagagaaatagcaaaacttgctataaaagatacttgtacattaactaatcctaaggtaccaactgaagatgatataataaacatattaaataacattaaataactacattttattacatgtaaatataatattatacaaatagggaaaatgtttttaaaaatataaattatatattgacaaatataaaacataaaactataatgaaagtatcacaaaggcgtgatactttagtagaaagcaatggagcttcttaggaatattaatattattcttatggagctccttttattttaagcaaatagctttttaataaactatattcaaagaaagcagggaataaatttgactgaagaatctaagcaaagagttattcaagaatatgttcctggaaaacaggttacattagcacatatcatagctaaccctaatgaagacatatataagaagttaggattagtacttgataaaagagatgcaataggaatacttacaataacaccaagtgaagcgtcaataatagcagcagatgttgctacaaaggcttcaaatgtatctttaggttttatagatagatttagtggttcagtagtaatatcaggtgatgtaagttctgtagaatcagcgttaaatgatgttttagaagtcttaggaaatatgttaaacttctcatctacaaaaatcacaaggacataataatacaatgaagaatataatatttatgggaaagacaggtagtggtaaaactaccttatgtcaaaaactagaccagttagaattaaagtataaaaaaactcaatcagtggaactttataataatgcaatagatactcctggtgagtatatggaaaatagaaacctatataatgccttaataacaacatcagcagatgctaaaattatagcaatagtgtatgatgccacacaagaagaaaattatatagcaccaggttttgccagtatgttttgcaaagacgtaataggaattataactaaaataaataaagctactgaaaacgaagtcaatatagcttatgaaagactatcactagcaggagcaagtcaaatctttaaaatagacacagttgatgatattggacttgaaaaattatttaaatatctagaaaaatctaaaaatatagatgaagtttaaggggaaatatttttttattcaaaaatattattaaagtatgataaaataaaaaaatgtataaactattttaagaagatttaatctttaagcgaggtaggaacatggggaaaaaaatactattggttgatgatgaaccactgttaaggatggatacaaaagatatattagaaagtcatggctatgaaataataggcgaagcaagtgatggatttgaagctgttgaaatgtgtaaaaaacacaaacctgatttagttataatggatatagagatgccaatacttgatggtataaaggcaggcaaaataatatgtaaagaaaatctagctggtggagtacttttattaacttcatttgaagataaagaatacgtagaaaaggctaaaagtataggtgcttatggatatttagtaaaaacagcaagtgaaaaatcacttatcccaaccatagaaatgtgtttaaataaggtaaatgaatttgaaaaaatgaaaaaagatttagaaaaagtaaattctaaattgaatgaaagaaaattagtagaaagagcaaaaggtatacttataagagagtttaagatttctgaggatgaagcatacactagaataagaaaattaagtatggataaaagaactacaatgatggaaattgccaaaatgattataataggatacgatgactaatacgataaaaaaaatatcaactgcacaaacatacttaaataataacgaaattgaaaaaattatagaagtatcaaaatccttagatttaatggcttctttttatgaggctgatgtttttatagatgtactaagtaaatttgatgatgaagcaattgttgtggcacatggtagacctaaagaaaagtcaatgtactgtgaaaatgttataggtaaaaaggctttaattgaaaatgaaccaggagttataaagtgcttaaaaacaggagaaagagtaagagatattaaagctttaacacaggaatataaactggtcaaacaaaatattcagccaataacactagatgacaaagttttagcagtactaatagttgaaaaagatataagtagtgaagttaagaatgagtttaatgctagtgaagacgaagaaaataaaaatttacatcagtttataaaacttatcggaaataatgactttttagttgataatttaaattcagccatattaatatttgataaaaatggaaaattaaaaattaaaaatcgtattgcaactgagatatacaaaaatcttgggtttggatatgatatacaagatatgcattacaatgatttagatatagaaaccaacacctttgaaaatatattaatggatgaaaattatgatgagacaaatgaagtttcaataggtaatatgttttttaaaataaagaccatatacatcaaagatgatgaatttaaggtttgcaaaatagtacaagatataagtgatttaaagagaaaagaagaagaattagttttaaaaacagtggctataagagaagctcatcatagagtaaaaaataatcttcatacagtaatatctataataaaaaaacaaagtagattatctcaaaatgatgaagtaaagcagtgtttagataacataataaacagagtatttgcaatactttcaactcattatttactatctaaagaagttgataataatatatctatacgagaaggtatcaatttattagtgtcaaatattcaaggtggctatttatttagtaaggatatagatatacgtataactggtgaagattttaaaattagtggagaaaaagcaacagcaatacttttggttataaatgaaatactacaaaattgttatgaccatgcattttcggatagagaacatggtactatacaaatattaataaataaagataacgactatagaaatattgctattatagatgatggaattggatttgatagtaataatataaataaaaatagcttagggacatatataatagatagttatataacacagatgttaaaaggaaatatagagagaaaaagtaatgagaatggtacagaagtattaattactatacctacacaaattaatatttaaataataactcatctacaaagtagtagttttaattgagcaaagaggcttaaggttattaatagattaagttaattgaatgtatttataaaaattataagtatatattcaatttaacaggtatttattataactttaagcctctttgcttgtttaagacatacttaaattttaggaggtgagaaaatgagagaagagttattaagtgttggtattgacattggaacaagtactactcagttaattttttctaaattaatagtagaaaatactgaatcaaatttttcggtacctagaataagtatagtagacaaagaaattatttataaaagcaaagtttatttcacccctcttatttcaaataatgaaataaatggtcaacaaataaaagatatagttgaaaatgaatataaaaaagcaaatatatctaaagaggatatacatacaggagcagtaataataactggtgaaacagctagaaaagaaaatgcaaatgatgtacttcatactttgagtggatttgctggggacttcgttgttgcaacagcaggacctgatttagaaagtataatatcaggaaaaggagctggagctcatatttattcaaaagaacattcaactacaattgtaaatatagacataggtgggggaactagtaacatagcctcatttaaaaggggagaagtaaccgatactgggtgtttggatataggtggaagacttgtgaagatagataaaataagtaaaaaaataacttatatatcacctaaaatagataaaatcataaaagataataatttaaatcttcaagtaggcacaatggctactgtagaaaatacaaagccaatagtggatataatggttgacttattaatggaaagcataggattaaagaaacagacacctttgtttgattttataataaccaataaatcaataagtatagatgaaaatattaaaaatgtttcattctctggtggagtagctgattatatttactatgatggagaaataaaagattattttgaatatggtgacttgggaattttacttgggcaaacaataaaaaattgtgaataccttaaaaaagtaaatgtagttaaatctatggaaacaataagagccacagtggttggggcaggttctcatactactgaagtaagtggaagtacaataacttacactagcgaaaagtttccacttaagaacttgccagttttaaaattatcagttgatgaagaaacaggtacttcaaaacaaatcagtgaagctataaaaaataaacttaattggtttaaactagaaaatgatttgcagaaagttgctatagccatgataggaaagaaaaatccaacctttttagatatacaagagtatgctaaagggtttgtagatggaatgcaacaaatcatagaaaatgatttaccttttatagtaattgttgaaaatgatatggcaaaagtgttaggtcaagcaatatatgcattattaaattatgaaaaagaaattgtttgtatagacagtgtcaaggttgaaaatggagactatatcgacattggaaaacctatagttgaaggtaaagttttacctgtggtaataaaaacattagtttttaattaatagaaggaggtaagtaaatgattttaaatacaaaattatttggacgtacttatcagtttaaaggcttatatgatgtaatggctaaagctaatgaagaaaaatcaggagataaattagcaggtcttgcagcagaatcagctgaagaaagaatagcagcaaaagttgttttatcacacataaaattggaggatataagaaataatcctgcagtggcatatgaagaagatgaagtaacaagaataatacaagatgctgtaaatgaaaaagtttatgaagaaataaaaaattggacagtatctgaacttagagaatggctattggattcaaatactacaagtcttgatataagaagaatatcaagaggattaacttctgaaatgatagcagcagttgcaaaattaatgtcaaatatggacttagtttatgcagctaaaaagataaaggttactgctcactgtaatacaactataggagaacaaggaacattatcagcaagacttcaacctaatcatccaacagacgacccagatggaatacttgcatcacttcttgaaggtttaacttttggtataggagatgcagtacttggattaaatccagttgatgactctgttgagagcgttactaaagtattaaaaagatttgaagaagtaaaacaaaaatatcagataccaactcaaacatgtgtattggcacacgttactacacaaatggaagcaataagaaatggtgctcctgcagatttaatattccaatctatagcaggttctgaaaaaggaaatgaagcatttggatttaatggcgacactatagaagaagctagacagttagctttaaaacacggtacagctacaggacctaacgttatgtattttgaaactggacaaggttcagaattatcttcagaagcacatcatggaatagaccaagttactatggaagctagatgctatggatttgctaaaaagtatgaaccattcttagtaaatacagttgttgggtttataggacctgagtacttatatgatgctagagaagttgtaagagcaggacttgaagaccactttatgggtaaactacatggcttaccaatgggtgttgatgtttgttacactaaccatatgaaggctgaccaaaatgatatggaaaacttagccatactattaacaacagcaggatgtacgtattttatgggaatacctcatggagatgatgttatgcttaactatcaaacaacaggataccatgaaacagcatcacttagagaaatgtttggactaacagcaataaaagaatttgatgcttggatggaaaagatgggattctataaagatggtaagttaacagagttggcgggagacgcatctgtattattaggataggaggtatttaatatgaatgagaaggatttaaaagcattggtagaacaattagttggacaaatggttggagaattagatactaatgttgtatctgagactgttaaaaagacaactgaagttgtagtagacaacaatgcttttatagatgatataacagaagttgatataagaaagcaattactagtaaaaaatcctaaggatgcagaagcttatttagatatgaaagcaaaaacacctgcaagattaggtataggaagagctggtactagatataaaacagaaacagttttaagatttagagcagaccatgctgctgcacaagatgctgtattctcttatgtagatgaagaatttataaaagaaaataatatgtttgcagtggaaactttatgtaaagataaagatgaatacttaacaagaccagatttgggaagaaaattttctcaagaaactataaataatataaaatctaaatttggtacaaatcaaaaggttttaatattagttggagatgggcttagctcagctgcaatagaggcaaatttaaaagactgtgtgccagctataaaacagggtctaaaaatgtatggtatagattcaagtgaaattttatttgttaaacattgtagagttggtgctatggaccacttaggtgaagaattaggttgtgaagttatatgtatgttggttggagaaagaccaggattagttactgctgaatcaatgtcagcatatatagcttataagccatatataggaatggcagaagcaaaaagaacagttatatcaaatattcacaaaggtggaacaactgcagttgaagcaggtgctcatatagctgaacttataaaaactatgttagataaaaaagcttcaggaatagaccttaaataaagtcgagggagtgtagaatatgaaaaatgatgtaattcgtcctaatatactaggaattaaaataatttcgaatataagtccagaaatggcacaaaaactagaattaaaatcacatcacaaaagtttaggtttaataactgcagactgtgatgatgttacgtatacagctcttgacgaagcaactaaagcttcagaggttgatgttgtatatgcaaaatcaatgtatgcaggtgctgcaaatgcttcaacaaaacttgctggtgaagtattaggaataatagcaggcccaagcccagcagaagtaagaagtggtctaaatgcagtagttgattttctagagtatggagcaacttttataagtgcaaatgatgatgattcaatagcatactatgctcactgcgtatcaagaacaggtacatacctttcagagatagcaggaataagagaaggtgaagcattagcttatttagtagcaccaccacttgaagcaatgtatgcactagatgcagcaatgaaagctgcagatgttaagatgtgtgaattatttgcacctccaactgaaacaaactttggtggagcattacttacaggttctcaatcggcttgtaaagcagcatgtgatgcatttgcagaagcagtaaaatcagttgcagacaatccaacaggattttaaggatagttagatggatgctataggcttaatagaagtaataggatatgttgctgcaatagaagcttctgatgcttgtttaaaatctgcaaatgttaatattgtaagaattgataaggttggggcaggtattgttactttaacaatatgtggagatgtcggtgctgtaaaagctgctttagaagcaggtgaaatagcagcttccagagttggtacattaagaacatcacatattataccgagaatccataatgaagtaacaaatgctttattcaaaactaaagaacctaaagtctgtgaagtttcagaagataaagaaaaaaactttgagattacattggaaataactgataatgtatcgaaaaatttatcagaaaaagaaaatgtaattttagatgtcaatgaaaacagtggagatactgaaaatttatatagtgatatagataaaacaaacaaaaaaattgaaacagttgatgatagtttaacagaagctaatgaggaaaaaatagaaaatactaatgataaagaagtattggaacaagttaaaatagaaaattccgattttgatagagatgacctatcaaagaacagtgtaaaaaaacttaaagctatggctaagaaattagattcttcaataacttataaagatttaaatgttcttaaaaaagaagaattaataaacttagttaaaaagcttagcagaagggatagatagttatgacacttttagataaagatttagtatctatacaagaagtcagaactcttgtaagaagatctaaagtggctcaagagaaactttctaaaatgagtcaagagcaaatagataaaatagtaaaagctgttgtagatgcagcatttaataatgctactaaattagctaaaatggcaaatgaagaaactggatttggaaaatgggaagataaagtaattaaaaatacttttgcatctatgggagtttatgaaactttaaagaacacaaaaactattggaataattggtgaagataaagaagccaatacgatagatatagctacaccagttggagttgtggcaggtcttataccttcaacaaacccaacatcaacagtaatatacaaaactataatatctctaaaagcaggaaatactatagttttctctccacatccaaatgcaaaaaactgcatacttgaaacagttaatataataagtgaggctgctataaaggctggagctccagaggattcaatattatgtataactaatccaagtatagttggaaccaatgaattgatgaaacataaagatacaaacttaatactagcaactggaggagaagcaatggttagagctgcttactcttcaggaacaccagctattggagttggaccaggaaatggaccagcatttatagataaatcagcaaatgttaaattagcaatcaaaagaataatagattctaaaacttttgataatggtgttatatgtgcatcagagcaatctatagtaatagaaaaatctatggaagaaactgttttaaaagagcttaaaaatcaaggtgcatatgttttaaatgaagaggaaagtgaaagattagcaaaattcatattaagagctaatggtactatgaatccacaaatagttggtaaaagtgttgaggtaatagcaaatttagcagacttaacaaatatacctaaaaatacaaaagttctagttgcaagagaaaataaagttggtcacaatgtagcctattcaagagaaaaacttacaccaatactagcgttttatgttgaagaaaatgtagaagctattatgaacagatgtagagaaatattgttaaatgaaggtgcaggtcatacattctcaatgcatgtaaatgatgaagaattggtaaaaagatttgcccttaatatgccagtatcaagaatacttgtgaatactccttcagcacttggaggaataggtgcatcaacaaaccttgtaccagcactaacacttggttgtggtgcaataggtggaagttcaacttcaaacaatataggaccacttgatttaataaatgttaaaagagtagcttatggaatcaaagaaatagaagaacttggaagagataaatctcaagttgaaaaatcaatgtttgactcaatggataaagaagaattaataaatcttcttgttcaaaaactagtcaaagaactagcataactaaaataaacaatgaaacttatggctatcgctataaatttataaaaatataaactataaaaaactataaaattaaatttttggaggataagattatggcaagtgcaaacgcattaggaatgatagaaactaaaggattagtaggagcaatagaagcagcagatgcaatggttaaagctgcaaatgtacaattagtaggaaaagagcaagtaggtggaggattagttactgtaatggtaagaggagatgttggagctgttaaagctgctacagatgcaggagctgcagctgccgagagagttggagaactaatatcagttcatgttataccaagaccacactttgaagtagatgctatattaccaaaggtatcagctgagtaatataagaataattttaaaatttaaattttgattgaaaaagaggctatctcaaaaatgagtcttactaataaactcaatgtattttgaggtagtcttttttatacatctaataggagatgtgataaaatgggtgttttaacagaaaacgaagtaaaaagaaaaattggaaaaaacaaaaataatataactgaattttatatagaaaaaggtcaaataataactccttctgcaaaatcttatttagctgagagaagtattgagcttaaatatgttgataaactttcagatgtaaacaatgaacctaaagaagttgtaaaagaagtagttaaagagaaaaaatataaatatactactgtatttggcgctaaattggatgaaaaaccagaacatatgactcaattaaatggaaatcttttagtttttaaagaccataaaagaataatattgagaggaaaaatagattctcttgaatcagaaatactaaaggtacagatactttgtcagaaactagatatgccaaagcttgttaaggaattgcaagaagtattagactttgtaagaaatataatgagatgtgaagttttagatgaaaagctagaagactttaaacttttaggattaactcctcaagaacttagagaacaatctcactatcctaaaaaatactttggtataggacatgaattcccaagttatgaaatgggagaagtagtagtagctataaatagtataagaagtaatacacgagaggttgaacttgcagcctatgaagcatttaagggtgagtatggaaatgttcacagagaagatttaataaaggcacttaatagattatcgtcagtattttggataatgatatataaggttagaactaataagtataagtagttggaggacataatggagaatctattaaatgaaatagtggaagaagtaataactagagttaaaaaagaagcatttatagaagttgaagcatcaggaagacacgttcacttaagtagagaagatgtcgataaattatttggagaaggatatactcttacaaaactaaaagacctatctcaaccaggtcaatatgcatgtaaggaaagagttacaataactggtcctaaaggaagtataaaaaatgtagttgtacttggaccatgtagaaatgaaactcaggtagaaatatctttaacagatggttcaactcttggactaaaagctcctataaaacaaagtggagacttagaaggtactttaagtattaaaatatcaacacaatatggtgaagttgaacttgataaggggttaatggttgctaaaagacatatacacatgactcctaaagatgctgaaaaattcaatgtatgtgataaagagatagttgaagccaaggtgatgggtcaaagacctttaacatttgatgatgtagtaataagagtgagtgacagttttaaaacttatatgcatatagactatgatgaagccaatgcatgtggttattcaaaaggaactgttgctaaaataataaagaaagcataaatttaacctactatataaattacctctagggaggatttaatatgaattatgataaccttgtagatttaataacggaagaaatctataaaaaaataaatagtaatgaaataaaaatatctaataaacctaaagctgtgattgtatttgaacaagataacaataaatttaacttattaaaagatgaatttgaaatactagaatttgataaaagtataagggaatgtgaaatagtgatagtttcaagactttgtatgagggggctatcgaatatagcacttggaaattcaacaagtgatgaagaaagatttatactaaaaatgattatgaaaggcaaaaaagtatatgtcctagatgaaggaattgaatacaaaaaatataaggatactgcaccaaaagcattatataagaaatttatgtcatttgaagatgaaatatgtaaatttggtgtagaaattataaaagacttaaatgttataactaaaaataagttaaatataaagaaagaactagaaagtactagaggttctaaaaaagaagatacaaaagttttagataaagatgttttaaatttaaccagtgtagaaagtgtaaaaatagataatgaatttagtttggatttaaggaataaaaaacttatatcggaagctgacttaagaaaaccaactataaatggagttaaaaacatattagttaataaaaaaagtataataacaccattagctgtagattttatgagaatacaccatctcaaactaaagaaactgtaaggaggtaattttatggatataggaaaagttgtaggtaatgtttgggctacaagaaaagatgaaaaattatgtggccaaaaacttttagttgtaaaaattttaaaaactaaagacacatacaaggaaggcttcatggttgcagccgataatgcaggagcaggaaatggagacttagttcttatatccaaaggttcctcagctagagagtcgattgaaaaatctcatgttccagtagatgcaactatagttggagtagtcgattcgtttgaggtgtttgatgaataaaagtataggagctatagagtttaaaagcattgctaaaggtatagaagtatccaatgaaatgataaagaaatcttcagttgatgtattgtacttaaaaagtatttgcccaggtaaatttctaataatagtaggtggagaaacttcttatataaatgaatgtgtagattatggaataaaacttggagaaggatatattgtagataacttcgtaataaatgcaatttcacaagaaatattagatggatttaaaaataagtatcaaaagctagatagtatagtctctataggcgttgttgaaagtagtaaagtatgcgctggaataaaaatgcttgataagactttaaaatctggcgacttagtattagtaaaacttcaattatcttttgctataggtggcaaattagtatatgtagtagcaggagatttaagtagtttagaatatgcattaaaagaaagtgaaaatgtagtaagagaaaaagaagtaatatataagactgtaataccatcagtagacagtcaaataataaaaagtctaataaaataatggggggaattatgagtataaacgaaattataatctatgtaatggtagtcttcatggtacttggagctatagataaatgtataggtaacaaatttggtcttggagaacaatttgaagaaggtataatggcaatggggtcacttgcagttgcaatggttggtgttatatgtttagcaccagttcttgctgatgtattaagaccaattgtagtaccagtatttaatatacttggagctgacccagctatgtttgctggaagtttattagctaatgatatgggtggtgcgccacttgcacttgaacttgcgaaagaccctaattctgggttatttggtggattaatagtaggggctatgatgggacctacaatagtatttataataccagttgcgcttggaataattgaaaaagaagaccaaaaattcttagcaacaggaatacttgcaggtataataacaatacctattggagcattcgttggtggattagttgcaggattcgaggtaatgatggttcttagaaacttagtgccaataataatatttgcagtagttatagcacttggattattaaaattcgaaaatgctatgataaaaggattcacatactttggaaaaggtgtagtaatagttataactttaggacttgctgctgccatagttgaagctttaacaggaatagttgtaatacctggaatgaaaccaatcagtgaaggtatagaaatagttggagatatagcaatagttttagcaggagcattcccattagtgtttgttataacaaaggtatttaataaaccattaatggctttaggaaaagttcttggaatgaatgatgtatcagcagcaggccttgttgcaagtttagctaactgtataccaatgtttggtatgatgaaagatatggacaatagaggaaaaataataaatgtagcattctctgtatcagcagcattcgtatttggagaccacttaggatttacggcaggatttaattctaatatgataacaccaatgatagttgctaaattagttggtggtataacagcagtattgttagctatggttatcgcaaataagacactaaggaaggagaatgtataagatggatatatcaaatatagataaaaatttaattgaaacattagtaagacaaataatagaagaaaaaataagtggaactaaagacacagtagattttgttagaaataaagacattagtggaataacttctataaagttaccaactgtaaaagttagtgaatctgatagattagatacagggaatccaagtgatgtagtttacacaaaagatttatttacattagaggaaagcccaagattaggttgtggtatgatggaaatgaaagaaacaacttttgattggactctaaactatgatgaaatagattatgtaatagatggaactttagatataataatagatggaagaaaggtttctgcttcttcaggtgaattaatattcataccaaaaggaagtaagatacaattttctgtacctgattatgctagatttatatatgtaacatatccggcagattgggcatctcaaaattaataaaaatcaagttaagttaataataatcaaataaataatttaaaatacaaactcttaaataaacacacatatttaaaaaagctatgaattaaaattcatagctttttttataaagaatgttatattttagacgtattttttctatatttactgggagacatattatattttttattaaataatctaataaaatgctctacatttggataaccaatactattttactgataatcttttccttatcactaatcttacattttaaaatattatttttactcgtaatattatcataagaatttgtttcttatttaaaactaattagaattataaagtttattgccatgttattaataaaataaatccagttaaatcgagtgctagttaaagtaataagaaacttttacaatggtttcctttatcgattgaaataaaagttaatatggtataatatctaaagagagaatcttatcaattagaatatgcatagaaacaagtggcttaaaaggagacgttatatggaagagatagtaaagaaggaacaagcaagtatgaatgatatttttttgtatcttaaagctaaatcaaactcattatataaatttgtaatattatataatgagtttatcaataaacctaaagattatggaactggggaacttataaacatggttgaagtacatatgctaacagcgattgaagaaaatccaggaataagtccaactcagttagctaaaatatggaacagaactaaaggtgcaatatctcaaactatatctaaattggagaaaaagggttatataactaaagaaaagaaagaaggaaatgcaaaaactatattactatatccaaccacatcaggagtagagttaagtaaggcacataaactatatgacaccatagatgttacaagaacatttgaatacttaatcaaggagtgtacattagaggagatagatagtttttataaagtaattgatttgtttattaatttattagaagaatctccgcaggaaaataatgattctgaaaaagtgtagctaagattgaagttgaataaagagaaatagatattatagaagtagtacttaagtacacattatataaaaatataataggtataggattaaaaagtttagtggtttaaagtttaaccactaaacttttttaatgtctataatctactattatttaatttactaaaaataaaaaaactcattatattaagatgaaaatagaaaaataactagaaaaatactataatatatcagcttaatacagaaaaaagttaaaaatattgagaaaaataaaaatgaaaacgttttatattgacatagagaaaaagtagtgataccatttaaatatagtttagtagctaaactatatttaaattataataactattttagggggatgttatgaatttaaaacaattaagtgaaaaatacgaagaatatgtaattcaaatgagaagagaatttcataagtatccagaattatcttttaaagaaataagaacaacccaaagaataagggaagaattacaaaaaataggggtcccttttgtatctattgaaccaaatatcgtaatagctactatacaaggcaaaaatgaaggtaagacaattgcaattagaggagatatagatgcgcttccaatgcaagaagattcagatgttgaatacaaatcagaatatgatggaataatgcattcttgtggacatgatgctcatggagctatgttactaggacttgcacatatgctaaatgatataagaaaagatttaaaaggtagagtattattagtttttcaagcagctgaagaagttggtggcggacacaaggagataatacagtactttaaggaaaatggaggaccagatagattaatagctactcatgtttggtccgatattgaagctggtaaaatttctgttgaaccaggacctcgtatggctggtgggtctggttggagaatagacataacaggtagaggaggtcatggttctagaccagatcaaagcatagatcctataaagccagcttgtgatatagttttaaaagtatcttctataccagttaatcatataagtgtactagaacaatgtgttgtacatgcatgtgcaatacatggaggaactacaataggaaatgttattccaaacaatgcagaggtaataggtggatatagatattttactgaagaatcaggcaaaaaagtgtttgacattataaagcaaatgagtaatggtgttggacaagcttatggagtggatgtgaaggttactcatactggaggcataggacctgttatcaatgatgaagaagcagttaagatggctaaagaaatagtttctaatatagatggattggagttagattcttatgagccaatatgtgcatcagattgttatggtgaaatattaaaagagtattctggtttttattgttatctaggggtaggtaacaaagaaaaaggaataatatatgcacaacaccatcctaagtacaatatagatgaagatacattaaagttaggttgcgaatttatggctaaatatgcagttgaatttttaaataaaaataataactaaaataaatcgaattttataaatgggggggatgaaaatgcaaggtgcattaaaggaaaataagaaaaaaagtggtggaggatttttaggatggattgaaagagttgggaataaaatgccacatcctctagcattatttacatatattacattgatagtagtagcattatctgcaatagcaagctttttaggtttttcagcaacaagtcctgctacaggaaagttaataaaagttatgaacttaataagtgcaaaaggtttagtactatttatgcaagagtttgttaagaacttccaaaacttccctgtgcttggggtagttttagttatggcagttgccacaggagtttgtgaaaagacaggatttttttcaactgccataaaaatgagtttatcaaaagttaaggggaatgcggttgtatttataatagcttttataggagtatttgctaatcaagctggtgatgctgcttttgtattagtaccaactcttgcaggagcaatattttatggattaaatagaaatccattagctggtatattctgtggatttgcatcagttggtggtggatttgcaacagctgtaattcctgggggatgggacgttacgctaacgccaataactgtatcagctgctcaaactattcaacctgcatttgatatgacattattagctagttattatgcactatttgtatctgcgtttatagtagctacagtatcaacaatagtaacggttaaatttatagaacctaaattaggtaagtatactggtaaaccagaaggtatagatgataatcaaggttttgaggtcacaaaagaacaagcaaaagcagcaaagttagcaggttttacagttttagcttatgtagcgttattaattgctttgtgtataccagctaatagttttttaagaagtccagaaggttctttaatatttggagcaccacttatgtcttgcttacagttttttatagtaatactattcttcttgccagggattgtgtatggaatgagggttggtaaaatcaagactgtaaaagacttaaatgatatattatgtcaatcaatggcagcaatggcaccgtttatcgtacttgcaatagttataggtcaattcttaacgctattctcagtgtctaatttagcacaggtactagctataaaaggtggagcattactcaactcattgccactaccaccacaagttataatactgctattcttagtactagtagcgtttataaatatatttgttataagcggaagtacaaaatggatgatatttggaccagtatttgttccgatgttaatgcaattaaacatacatccagcatttactcagtttgtatatagattaggagattctgtaactaatcatttatcaccattaaatgcattctttataatacttttagcaacagtccaaaaatacgataaaaatgcaggtatgggaactatattctcagctatgataccttacactataggttactttgtagtacttgcagttttagtagtagtttggatgacaataggtataccagtaggaataggtggacaagtttggttataaaacatatttaataattttgggaggaaagaaaatggaaacaactgaaataagatacaattttgatgaagtaatagatagaagtggaacaaactgtcttaaatatgatcttaagagtcaatttatgccagaatctccagaagatgcactaccactatgggtagcagacatggattttgcatgtgctcctgagataattaatgcaatgcatgaaagaatagacagaaaaatatttggatatagctctcaacaaactgatgattattatgaagctgtatgtggatggtttaagagaagatttgattggaaaatagaaaaagagaatatattctttagcccaggggttgtgcctgcgttaggatttttcatacaaatattaacacaaaagggtgatggtatcataatagaaaagcctgtatactatccttttgaagataaaataactaataatgaaagaaaagtagttaatagtcctttaaagtttgaagatggtcattattctatggattatgatggatttgaagaattagctaaagatgaaaataataaggtgtttatattatgtagtcctcataatccagttggtagagtatggaaaaaagaagaacttagaaaaatagtagacatatgtaagaaatatgatttgtggataatatctgatgaaatacattgtgatattattcgtaaaagtgaaaagcatataccattagaagtagcatgtcctgattataaagatagaataataacttgtacagctccaagtaagagttttaacttagctggtatgcaattatcaaatatagtaatcaataataaggaattacaagaaaaatggatgcttgaaacagattctaaattagctatattcctacctaatccattcgcaatagttgctactaaagttgcttataatgattgtgaagattggatgaatcaagtaaatgagtatatagatggtaatattaaatatgtagaagattttgttaatgagtatatgcctaaagtaaagataataaaatctcaaggaacttacttaatttggttagactttagagggtatggattagatgcaaaacagcttgaatatgtaatgcttaacaaggcgaaggtattgctagatgaaggatacatattcggagaagaaggagcaggatttgaaagaataaatgttgcttcgcctagaacaattatagaagagtgtatgaatagaataaaatgtgcatttgaaggattataatagtaatatctaaataatatatttgtgtattttaaaaaaagactatgttaaaaaaatatttcaaagcatagtcttttaaagttttatgatgagtttaaaaaatttcaaaacgttactattattgataatcttcacttatatgtttatattagaaataattccacaatatgctcattttctaaagttgcacttttatacaccttgcttcaccaatatcatgtgtaaccaaaatagtagacttattctcattcttaataatactataaacatcatcacaaactaataatctagtctgataatcaagagctgaaaaaggttcatctaaaagtagaatatctggatttacagaaagtgttctaataagcgcaactctttgtctcatacctccagataattcttttggatacatacttctaaaatcccataatccataagtctttaaaaggctttcaactctatctaaagattttttatcttttttgccttgaatttccaatccaatagttatattatccattatatttctccattcaagcaaattatctttttgaaacatatatccaatatttccagtaatctttatatcaccactagtcggttttaaaagattagtaagaatatttaatattgtagatttaccacttccagaaggaccaagcaaagttaatatttctccttctttcaagttaaaattgacatcctttaatacttcaagctcgccttccttagtgtagaagttcatatttatatttttaacttctactatgttgtcattcattatgccaccccctataacttttagctcgtatatattatgttattaacaatatgacctatttgtaccatttttcataaatataatataaatattttgtttatttacgtattttcttagtaacttgtacgtataaattataataaataaattataaggtaggggataaatttgagtaacataataacgaatttaatagagtcagtatttactaatccaataactatattgtttttacttgcaataactgtgtattctgtttttaaaataatagaaaataacagagtatattcatttgtaagttcaaaattagacgaaatcaatagagattataagacaagtgagttttataaaaaggtaagggatgactactatacatatagtaaagaaaatccttatgcagacgtaaatataacttcatttatagaggaagttgtatctgatttaaagcataataatttgccattgttagaaaaaattagaagtataaaaaattcatcttcaataagtatattacttggggttttaggtacgtttgttggtctttctacaatgcttttatgtgttgatactaaagacattataaattcacttccttcaactattagtagtatgcaaactgcatttacaactagtatatttggagttgtattttctctaattataggttactttactaagataaaagattgtgaacatgttttgatacaaataatgttaaaatctgaaaatttactaacatctgaaataactcattttaagtcagaaagaatggatttaaaagtagaagaggtaaaaaatacaataaaacaaataagtaagtctatagaagctattgaaaaatttgataaaatatctaaagatttaaatgactttaatgatgaatttatcagtggtatagaagctttaaaaagccttttagaaggttctcaaagttctattaagacatttgaccagagcgtaagaaaattagataaacagtttaatattttaaatataaaatttgtaaagctttttgataaatatgataatcaagataatataaataaagagattttatttgatataaaagaatcttcaaaaaatatatacaatgccactgaaagccaattcaaaattagagattatataaaaaatataaatgcaggatttgctctatatgaaagaagtgctcaagatttattaactaaattaatgacccatgaaaataaaatctctcaaaatcaaaaaatccttttagatgaaaagtttaccttagatgactcaataaaaaatctctcaagtattattgaaaacttttctaatgacctacaagttaaactggatatgatgtttgaaaattctttagatattcaagataagttagatgttatgtttaataactcttttatgaatgatgaagttcctcttgatagtgaggaattatttaaggatgatgttaataatgtatttaatccttttagtgaagaaatttatgagatagaggataaagaaataaaggtcataggtgaggatgagttaaatgaataataaatatagaagaactgttaacagagaatttgaaaagagtagcttttggccaacatttacagatttattatctactgtattgatggttgtgattcttatcttatttagctcagaaagtatttcaggttctgttgaacaagatttagctaagaatgtcaatgcttctgttgaagaaacttttaaaaaaagcaaaatacctgtgaaggtagataaatctaatgggcaagtaacttttggtgaaaaaaccatgtttgatgtagatagtgatgttttaaaaccagaggctaaagaaatgctaaaaatgtttgttccaaagtacatagagactatttataaagattatggtgactatatatccaaaatagttatagaaggtcatacagatgatgtgggaagttatatatacaacttagatttatcgcaaagaagagcatatagcgttgctaaatttatagtgggagatgaaataggtgactataaatacaaagataaagtgactaagcatattattgcaataggaaggtcaaaagctgaactcatcaaaaatggtgacaatagcgtgaatagagatgcatctagaagagtagaactaaaatacgaaataaatattaatcaaaataaataattaaatttttataaaaaaaaagaaggcagttggtgtgagctttaagccttctttaaggaaaaagtttatttatttttgttgatacttaacatattatagtttttagaagcagtttgcaatatattaaacgtaaatggtcgtttaaaatgcataactggatactactgatgtaaaatatttcattttatataatataaaaattatacagtgtcaattttctatattattgtactataatctattatttaaaatattatgtaaaaaaatatcataaaaacgcatatcatgttataattactagagtattatgaatatggaggcgtagtttgtgatagaaataagtataaaaaataaaaaaaattctaaaattaaaactttgatacttttattgatagtatctatatcgatttatttaactggttgtactacatcagataatggaaataatcaatcaaataataatgattctttgtctagtagtatatcaagtgataagaatgtaaaaattcattttattgacactggaaatagtgatgcaatattgattcaagatggtaaaacttttacattgatagatgggggagataatgatgatgagggattaatggtagattacctaaacaatcaaggtgtaaaagatattaaatatcttatagctacccattctcatgcagaccatttaggtggacttgattctgttgtcaaaaactttaatatagaaaatgtttttgtatcgaatggttcagcagaaacaaagagttatagggactttataaatgctttagcaaataagggtttatccccaagtgtaccgcttgaaaataataagttctatttagaagattcttattttgaagttctaaatacaaatgggggagatactactaatgaacaatctctagtccttgtatatactaatgggaatgataaagttttatttacaggtgatgctgaagaaggtaccgaaaaagaaatactacctaagcttgagaaagtagaccttttaaaagtagctcatcatggttctcgtagtagttcatctcaagagtttttagataaagtaaatcctgaatatgcggttcttttagtaggcaagggtaattcatatggtcatccacatcaggagacaatgaataaattgaaaaaaatgggagtaaaagtacatagaagtgatgagtgttcagatataatatttgaatcaacaggtgatggagtatttacaagttgtaaagatggaagttataataaaggtgttagagaagatggaaactctggaaaatcaaacagtaatacaagtaaaaatgattcttttaaaaataaacaaaatacattcaattcagaagaaatagtgtattttactccaaaaggtaagagttatcactctataaaaaattgtagtgggctttcaagaagtaaaaaaatattatcaggcacaattgaagaaagtaagaaaaatgacccatgtgatatatgttatggaaaataacaaaaaaacaaccaatttatctataaagcttctgaactttaaatcatttaaaaaataaaataaatgcataaaaaaaataagctataatcaatagataatacatttcatctatacgaatagcttatttttttaagtattttttaatagctatttaataactctaaatacaccagttacaatacctacaatttcaacttctgagtcattgagcataattggttccataaaatcattttctggctgaagtcttattaaatttccttctttaaaaaacctcttaactgtagcagattcaccatttataagtgcaactactatctgagaatttaaggccgtattttttttgtctactacaacgtaatcttcatctaaaattcctgcattaatcatactttcgccttttactcttaatacaaaattgttactgccctttactaaactggcagggaatggaatgtattcctctatgttttgttgagctaaaatgggttctccagctgttatttgacctactaaaggaagctctattatttcttgattagctccagaaacatcatttactttactacgttctaaaacttcaatagctcttggtttagtagggtcctttcttatgtatcccagtttttcaagtttatttagatgagagtgcacagttgaagtagatcttaaccctacagcagtacatatttctcttacagcaggtggataaccttttaatgtgatttgagactttataaattccaatatcaagacttgcttttcagttagatctaaatacataacatcactcatttccaaacatattttgtttttatttccatacactttatatttttaattataacataatccatttatatctgcaaacatttgttcctgatttttaatcgtcctcaatccattcaaaattcttgactatatcacgttttacatttttcttatgagctgcataaagctgagtagttgtgacattatcatggtcaagtaagttttgaacatcatatatagaaaatcctgtttggattagagaagttgcagccgttgctcttaatttatggggactatatccattgtctctagtagtatcaagtggaatagatgtatatttttttaccagtgttcttatagcctttgctgtaattctcttattttgaagagacaaaaataaagcatctttttcttcatcatttaatagttcatctcttgttctttcgttttgcaaataatcttttattacatgttcacaagtatgatttataggcattaaaacttctttcccacgttttctatatattttaaattcacctcttgaaaaattaaaagaggagatattgagttctctaagctcatttaatctaagcccgtatgtaacaaataatgctagtatagctttgtcacgtaatttagtttttctccaatataccttttctttctctgtaagcccttcacctgtttctactgattcaagcatcttagcaacttcatctatctcaaggcgcttaatagcatctggctgaggtttaggaagttttattggattgaatccatcagttatattattatctatctgagagtttctgtataagaatttaaatagagtagagatggatgatttttttcttgctaacgctctattgttattttcaaaaatcaatgtgtttttttctgtatttttgtaatatctactgcaataatcacctaagaataaatttatatctcttgattttattgtattaaaatcatcttctgtaatatcttttacacaatctgcatttgttaattctttggtttcaatcaaatatgaacaaaaaaaattaatatcttctaaataagcaagtcgtgtagaaactgcaacagaaccttttaaatatataaaataatccttcataaatacaggaagtttattttccaaaagtagacatttttctatgagttcattttctttgataacaatattatcaggtttatctgatttattatgtacttttataattttcttatcattattcaaaattaaacctcctaaaactaaaatataaatcttttatattattttttgatatttataccaagtgagtataaatatttaatttaatcattttttacatttttaagagattagcagtgctttagatgaaattatcactaactattccctaaatccacatttaaagactagttgaatttaagtactctttttttatttctcaatatatttatagaaatattttaaaatatattgagaaattttttatgctctactaaaatcttttttatataatatttttatatatttctaacgaaaccaaatattagtaaaatatgtatttatttaactaaagtttttaaatgggctgactaagcttaaaatataggatattatgagagttactattgaaaaaataaaccctattgccataaagaaacttataaatatgttatacttaactattaaactggatatattcaagttatcaaatccaaataagtatgtaattgaacttattacaaaaataactataactataaagctcagaccatttaagctattttttaaatcagcactactaagtgacatatgtgtagatatagaatacattaaaaacataaatataaaatacttcaatgaatatacactaggtgttaacaacattattcttataaaattggaaatatcacctaaaataatgtgtataaaaccatttatatttaaattattaatcatacttacatataactttaaatctatattttgagtcactttcatataactatctggcagtaatatcttaaaaattaaaataatcattattgttccacctataataggtgcaattcctataaagaaatttcctatactttgataaagattatcttttttatagctatgacttacatatcctagtataccatcatttttactttctattggtctgaaaaacttaactgaatttattttatgcatgaaaatcaagcacattatcaaatgactcaattcatgaacaaacgttcctatagctccagttacaataattccagtttttccaaaagatgaaaagataaatttattatttagattttctgtaatgctaaaaatcaatccaaatacaataaatattcctatgaaacaaaaaatatttattacacttatttttaaaatttcgattatataaatcataagttaagtcctcatgtaaaagtatttaactactctacttcatatccattacagcttaaaattttacaagcatcttctatatctttttcttttactaagatatagtctgtatcatacgtagaaattgcaaatatgcttattttgttgtctgctaacaaactacttaacttagataaaattcctacaagtgaaaagtctaaaggacctagtatcttaagtattctccactccttttctgacttaacatcagaaggaatattattatttaaacatacaacacttaattcatcatcagttctagttatagagtaaaacttctctgtatctatccatgttggtattttactgtcattatttaatctacatactgcatactcttctaccaataattttaatttcataatgtatatttcctccaatcttatttgtttacttaagattatacattaaaagttacataaaataaaacatataaagtaaaaaaggttcactatagtgtcctatttctatagccaacctttaaaacttaattaaattctaataaagagatatattatctaggttcaattataagtttaatggctgttttcttatcaccttcgatttctatatcagtaaatgcgggaatgcaaactaaatccattccactaggtgcaacaaaacctcttgctattgcaattgattttatcgcttgatttagagctccagctcctatagcttgtatttctgcaacgcctcgttctcttagtactccagccaaggctccagctacagaattaggattagattttgatgaaacttttagtacctccatttcaacatctccttgttaatttgttaaagtatccattacctaaagtactaaatcataattgccatttactaattacaatcatcatttaaagtatacttttataaaaatatacttctataatcgttttaagaaaacctttattttttttaaccattttattatgaaaaaactacaaatttctttatattctataagcattttccaatatttctaaattttttatatctttgagctataatttcctctttatccatatctttgtaatgatttaatctttctaaaatataagcttttatttcttttgaaacagcttctacatctttttgtgctcctccaagaggttcttttataatcttatctattatttttaaatcatataaatcattacttgtaagcttcataacatcacaagcttctttagctttagatgaatctttaaatagaatactagaaagcccttctggagaaatcacagaataaactgaatgttctagcatacaaacatcatttcctactccgatacctaaagctcctccactaccaccttcaccaattacaaaagtgattactggaacagaaagtttactcatttcaagtaagtttcttgcaatagcttctccttgtcctctttcttctgcttctaaaccacaaaaagctcctgatgtatcaataaacgttattataggtctattaaatttttcagcttgtttcataagtcttaatgcttttctgtatccttctggatgaggcattccaaaatttctttttatattttcttttgtatctcttcctttttggtgtccaactatagtaacattaaactttcctatctgaccaatccctccaaccatagaagggtcatctttaaaaagcctatctccatgaagttctaaaaaattagaacaaatatgttctatgtattccaatgtcgtaggtctctttatatctctacttagtgttaccttttcatatgctgatagatgtgaaaaagcatcttccttaagcttttccaatttctcattaagtgaatttattttatcacttaaatctatattatttgccttagaaatagttattaattgtttaatatcattttctaagacttttattttttcactattattttcaatcaaaacagttcctcctttatgccctatttcttgtgcatagcaagaatttgatataataattccttcatttttcttctatctactatcatgtcaataaaacctttttcaagtaaaaactcagaagtttgaaatccttcaggaagtttttgatttattgtttgctctattactcttggacctgcaaaacctatcaacgtatttggctcagaaattataatatcaccaagcatagcaaaactagcagttactcctccagtagtagggtcagttagaactgatatatatggcaatgatttttcttcaagcttagaaagtgcttgagaagtctttgccatctgcataagagataccataccttcttgcattctagctcctcctgaagcagaacaaataattataggtaaattattttcagcagcatactctattgaataagttattttttccccaacaatagaacccatacttcccatcataaaatcaggattcattacacaaataactgttttaattccatttattcttccataacctgtgacaacagcttctgactcttttgttttttccttataagagtctactttttctttgtatttaggaaaatttagtggattttgaaattctacatcagaattaaactccataaaagttcctttatcaatcaataaatttattctttttcttgctcttaagccataatgtcttgaacattttggacatacaaatgaattttcttctatgtcctttctaaatacatgactatcacaacctttgcaataggtccaaaatttatcatctacactattctttttaaagttgtcatctaaagaaatcgtaacatacttagattcttttgatgataaaaatttttttatcataatctatttactccttataatgtagcaaattctttcttcataaagacatcttctataaatttggtatgatgagtatcttctctaaactcctcacttgttacaagtgccttttgaaattctacatttgtattaataccttctacaataatttcgtctagagctctatatattctacttatacattcttctctagtttcagcccaacatattaacttacctatcatagaatcatataaaggtggtatagtatatcctgcatatacaaaagtatcaaatctaacaccaaaacctccaggtaaatttaatgattctatcttacctggtgatggagcaaaattctttgatgaatcttctgcatttattctacattcaatagcatgacctctaaaagtaatatcttcttgtttaaaaggaattttatccccattagctatagatatttgaagttttataaggtcaagatttgttaccatctctgtaactggatgttcaacttgtattcttgtattcatctctataaaataaaagtttttatctttgtcaactataaactcaatagtacctgcaccgatataacctactccttttactatatctactgcaattttatgaagtttttgtctttcttcatctgaaaggtatggacttaaagattcttctattactttttgatttcgcctttgcatagaacaatctctatcacctaaatgtattgcatttgaatgtttatctccaaatacttgtacttctatatgtctaggattttctataaacttttccatatataaatcactattagaaaatgctgctagagcttctgaacttgccatatcaaaatttgaaaaaagttcttcttcttttctaacgattctcataccttttccaccgcctccacttgaggcttttatcataacaggatatccaatttctcttgcaacttctaaagcttcttccttagttttcaaaacagattctgaaccaggaacaacagggatattcaattccatcatagtttctcttgctctagatttatctcccatcaaaatcatttgttctcttgttggacctataaaaataatattattatcttcacattgctttgcaaattcaggattctctgataagaatccaaagcctggatgaatagcatcacactttaatttaagagcaagatagattatattttctatattattataactcttacttatattatttggtcctatacaaatagattcatcagctatatatctatgaaaacaatctttatctatttcagaatagatagcaacagtttttatacctagttctttacatgttctgatgattctaactgctatatcgcctctatttgcaactagtattttttttatcaacttaaatacctcctactacaatggttttatcttaaataaaggttgattatattctactagttcttcattactaactaatacttcaattatttcacctttaatttcgcttgttatctcattcataagcttcattgcttctaatatacataaagtgtcgccttcttcaactacatcgccaactttaacaaagctatctgcatctggacttggagaatcatagaatgttcccatcaaaggagctactactactgatagattctcattagatgtgacaggtgtatcgtttacaactggcttttctaaagaaagatccactactgattcttgttgtacacttaaaacaggtgaacttgtagattgagcttttttagatacttctaatcttaaatcgctactttcaagttttacatattctaagttagttgagtctatggcctttaataattccttaatttcattgatgttcattttgttacccccttgtattattacctggtgctaatattatatcacaaaaaacaaatttataaaagaaaaagtgctgactagagaatcaacacatcaatatatcttttaattttaaattaacaaccagtaacttatatttgttttaattttccattattaatataaattataagtataaaatgaataaaattcaatattttttgcaaaatacaagagaatacaaattaatacctcgggaatttttaagacaaataccaatattatgcaatttagacttcgctttctttcaaattagtatcattttctttatttttacataggatgtactttaatttagctatcaaaacattactatataggttaaaagttattagaattgcaggaattataaagtaaactctagcacctataaaaccaaaaactactgtaataagtattaatcttttatttaaagtaaaaaaaggtatattaaaaatacttttgtcggatgtttctggagtataagaatatataactccaaaaatcaaagtaagcatacaaagtggaagtagtgtataacttgaaattattcccagaaatcctatactttcaaaatatttgctagcactatttgtataaacaaacatgtatccatttaaatatgcgcatatacatgatataatgccaaaagttccccctaaggattgagtgtaccaattaaaaaatttagattccatatacctcacctcctaaaactgtatatataatgatatgcatttaaatagtaaaatatatctttatatgtttctgaataaaattttgttaatttcattaatttatgtttaagaaatttgaagtatagtgtagtatatattaatgtagatgaagttttatagtacttatttcatagtgcttaatcaagttatcttattatggattcaaaagttgtttgtagggttttatattttgttgagctgaaaaatttattataaatgaagggatgttttcgctttggtagatacattagaatttggtcttaaaattttattttttatattatcaataatttggatgggtaaaataatgattttaagaactgataagcaaatagtaatcaatcctttgcttattggtatatctgcagtccttgtgatgttgcatacctcacagagtaacattgaattttttggattagatgtccaatatataagaatagttttgtatataatatattcactgataattttaataggaatatgggctactaacagaagaaatggaattttttagataatctatttctataaaatttaaaggttgctagtaacaaagcactaatattagcgttctgttactaacaacctttattttgattatacacttaaattgaaaatagaatgattgaataagttgacatattattttacattgacagtgattagaacttcttgagatgtatttaaatcatttttgtcgcttagtataacttttaccacagcttgacctgttttattacctttaattatcatatcttcacatgaaagtacactcttatcacttacagatacaataaagtctaaatcttttggaagattatcagtaacttcccagtatttataataactatcaattttcttcgtaattatttttctcaaatcaatactttcaccttttgctatatcaacattatgatatttagagtccagtttatactgattatcttttgtatcaataaaatttaaatcgcaatttacatccacaccattatgagaaagagaatttactacatcgtcatcaatcaaataattattggcaagatttattgaatccatatcttttagacttaaagcttccttaggaacctcttttatattattattccaaaaaataaaattgtctacattttcaagatatgatattccttttaaatttgaaatgctctcaccagttgcataaaattctccatctaaagcctttatattgcttatagtcatctcatctgggtttatatatctttttacaactgctcttaaatttgcatcaggaaaaatatctttaagttgattttcgctcaaaaccttatcatttgaatttattggacttaaagctgctgcagaaataataaatggtattaaattagctaaattcatagtaccctcccacataaattttttattataataatttaatttctatgagagggttctgtttccttgttatatatacctactttcgtacactttattaatataaattaaaataaatttctactattaaacttataaacatattactagttacgttttttagcttcacatctaaatattcgcataccttgtgacataaatttgtcttcatactctgttgtaacattattttcatactcactatttcctaaatcaagagaaatattctttaatagccaattatttgcagcaatttcatttaaactaaactcgaataatttttcattatctgttttaaagtgaatttcgccatcatcttccaaaaccctattgtacatttctaaaaatccagaatgagtgagtcttcttttactccatctatttttaggccatgggtcacagaaatttatataaattctcgataattctttagcttcaaagtaatccaaaatattgcttacatctccccataaaaatagtatattattcaaattagaagcatctgctttttcaacagcttttaaaagaacttcttccttaagttccatggcaatataatttatgtcagggttctgcttagctaaagttgttataaacttaccttttccagtcccaaattcaacatgtattggattatcatttctaaactttaaattccacttgccttttaatttgtctatatcgtctcttaaaacatattttgtataacttaaaagcttttcatctgcacctttttttcgtcttcttctcacaataattctccttacatataaaaaattagtaaaatacatttttattatacattatctcaccaaaaaataaaaagaactctcttaaaatagaaatttatttctataaagagagttctaaacttactaaaaacttaatcttagtggcaccctgaacaaccagagcatcctcctccaccttgatctttcatattttcaggaataactctaaatccaaatcctgtatcttctattattatatctccatactgactatattcatcagagctcattacaaattgtaattctccaacttcataagttaagtcatcttcttttttctcatctaaagctaatccaaaagaaggacctccacaaccaacacctgcaaagtatactcttatattattaggtttatcttgattgtcttttaagatactttttaaagtatcaatagctgtttctggtaaagtaattttcatcaaatcattccctttcaaatattttattaaaacaatatctattatatacccatacaaggtacataatcaattagtttttgcatattttactaaaacttctacctaatattacctaaggctttaaaatattttatataatattttattaccttaaataaataccctatcataaacttagtaaacaaataaaattattattctaaaaaatataataattttatttgttgttttaatattataacacatttgataatgtccaattcatatatgcaaaatttatatactttaaaatatctaagaaattattcaataaaaaaatactattttttaaaaattatcattattgataaagctctactatttatattttttagtgtattcatgtataataagtaaaagcacaacggtatatactgttgtgcttttttgtaattaataaacaatattttggtctataacaatgaaaaatggctactttccataattgatttcatctgacataagcaaaaagggtgtccagctgggtcaatcataactctccagtcatcagtaaattgctcctctgcgattgtagctccacaatgaatttcatattgaactgcttcttctaaatcattaacagcgaaatccatatgagccatttgctgttgagattcaggtttttctggccacacaggcggtttatactcagaatttcgttgaaatgttataccaggatatgttccctgatttgttcctggagcaccaacacatgcatattcttcattataaaatgctatttcccaattgagtaacgctgcataaaattttgctaattcatgtgggtctttgcaatccatcgtaaatgagtacattttgattttcagttcatcatgcataacgtaattacctccaagtataaatttcttcgtcttttcatttttaagctaaattcaaacattaagtatgtaatttatttcaagtatttttctattatgccccaagcctttgttttttgcaatataaagaaaaaattatatattttaatattttataattgttgaaattgtgtaataaattcaactggatacatagtgcgttttgaaatttcttctaaagctaaaccttgttttaaaagcctctttatgacgctttccatactttctgaaatttctataatatttttatcaaaatcataaaacctaaaagttctttgaccccatgggtattcttttatataatgcaaaaattcaatatttcctattctatttatcttactttcccattgtttgatatcattaacctcaaaatacaactgaaagttatttgattgttgatatattggtaaatcatatccaattatagctttataattactttgtaatccaaatccattttcaaatgatacatgttctcctaaatctaatgtaattttttgctccataacatcttcataaaacttttttgatttatttatgtctttgacaattagcaatactcctccaaatttcatcttatcactatcctttctttgttataagtattataacttaaaattttgcaatttcactgtaaaaatcagacatattagctcggtatttttgaggagttattccacagacaattttaaaatctttaataaaatgtggtatatcatagaatcctaattcattacatatatacatcaatgaagttttattattgtttagaagttttatagatttattaatacgtaccaaacgagaaaatgacttcatactcaaccctaggtactgattaaagagtctgtttaaatgcctagaactataaaatacttttttagaaatttcttgtgaagatatgtttccagagttttgaataatcaactgaattgccaaaataaactcatatgagtattcaattttaatattagaaatcaataattcttccaactttaaaatcaatttatctatagataaagattcattaaatatttttttaatttctaaatctaatgaagtattaattatagaaaatggaacaactttatcaataagttcactttgctgtatacctataagcgggaaaaaaccagcaggttgaaattctataattagtataacatcacatctattagcaatatttcctactgtttttggtttagtagttggaccaaataatagactatgtaaccctgtggcatcataaaaaaacaccaaagttacacttccatgaggaataatcgtgtaattatcagaaattattgtttgatttggaaacgatatagtaaaattcgatatccaattttttaattgcatacaaggcaagagataaacaaaattgtcttcacaaactataagtgacctatttttatttataaaatgaatactttctttttttaacatatattatatcctgtcctatcgtgaatatttattaaagtaagaagaatccatattatctctatatatcattaactgcttttaataatagagatagtatgaatactcattagatatttaataaacaaataaattaaaataatcaataaaaaatatagtacttttatctgttattttaatattatagcacatttatagtatttaacttatatccactttacatatgtctaatttatatagttaaaaatgcttatctcaaatacaataattagtccttatacaattaaaccatctgaaactgtaatagtacgactactacttttggctgcttctggtgagtgagttaccataattatagtttgtccattgtctctgtttattttattcagtaaatctattatttctatccctgttttactatctaaatttccagtaggctcatcagcaaataaaatctctggttttccaactaaagctcgagctatagcaacacgttgttgctgaccaccagataactctcgtggtgtatgtttacgtctatcagttaaaccaactatatctaagatttcatctaattgatttttataatcttttaaatttttaccatctaataacaaaggaagcattatattttcctccacatttaaatttggtattaagttataaaattgaaatacgaatcctatatttctacgacgtattatgctcattttctcatcattaaaatgtgatatatcagctccattcatatacacttttccactcgttggagtatctaaaccacctaaaatatataaaagagtacttttaccagaaccagattgacccatgatagaaacaaattcacctttcattacttgtaaagatacctcttttaacactcgagttgttgtatttccaattttatattctttgataatattttttgcttctacagctaaactattatgtgtaattttcatattaacctccataattattcaaacttaatttcttctatcagtttcattttcttcccttttataataggcactatcgaacctattaaagttactataattcccaataacccaacaataataaatgttttaaaatctaaatctggtttcattgaaatttttggtcctgcaactataaagatagtttgaatctcaagtatagatatcacaataccaataacagctccaagtaaacctgaagtaaacccttcaatcaatgtcacttttatattttgtttatcacttagtcctatagatttatacatagctatagaacgttttttttgaatataattaatcagtagattattaataatacctactgtagcaagaagaaaaatgaaataggtcatcttattcataggagacaaaaaactacttatagtatttaaagaatcattattaaattcttcaactgtacgactccaattatatgtatctccaaataaatctcttatctgaatcataacaacatctggattgactgctgtatatactaaaaaaccataattagttttatcaaaatcattaactgcataatgtgatggtataacagcttctacatcatttgcacgggatttaaaactacctactattttataagaaaaatcatacttatcattagatagagttattgtatctcctatagataagcctactttttttagagtatcttcattcaaaataacagaacgtttatcattaaaagcttctattacttgtttttttatctcaaaatttgtataattgattccaaacatagagttatatagttttatattatctgtaccctctagtcttgataatgttacaccattaccagaaatctcattattcataacataaagaggtaatatttttttaattccatccatatgtctaacattttcaataaactcttcattcatctttccatctgcaaaaccttgtaattctgcgtcacgaaacacatctgttatataagttttgacaaagttaccaacaacacttattgcaataactgcagaaatacttataaatagtaaagtgatattctgtattatatttttgttatttttcatatttctagcagctaatttaccctcattccctaaaatatttttataaacaaactcaaaaactatagacatgatatcagtaataagaggaatcaacacaatagtagctacaattaatcctagtaatgaaaatccaccagctagatacaatgtattttcaggggatattcttggaagtaaaatagataaaataaacattatacttcctataaaaagtatagaacgatttgaaacattcttttcttctactgttcctagtacaatattttttattggcaaatggctagcttttttaacaggtatatatgcactaaatgaagaaacgattattgctactataacagatataatcactccaatgggtgatattactactggaattgatattccttgttcgagagaatttcctaacccatgaagcattaaatttaaaacaactacaccaataggaatagcaattaatcctcctatacttccgtataatatactttcaagcatcaatatacgagttacagttttttcattggcaccaatacttctaaatgttccaataaaaggaagacgttctaatgtaataaccttatagctgctgtatatgataaatatactaagggttaatgcaaaaaaacttattaaaaagaaaggcattgtcttttgtctagcatctgaaattatcttagtttcatttatagtatttgataccatatatttttcagtggaaagttcttcggataatttatttactagattttctgtcatttcttcttctgactctataagaactcttgtatatccactgcctttatttataatttttgatagagtctctttgggtagcagtgcatttacacctcttgtattcctcaaaaatactgtatcataagatgcaatatcactaacttgaaaagtataagactttccataaatctgtaaagtaatagaatcacctttttttattttatattttgatgtaaagcgatttggaagaataattttatcaccagaaaaatcagtaatactatcgccattttctaatcgtggcttgttgattttatttagttgacttaagtctgctgatataagactaaattcttcatagtatccccctttattataaatagcagagctttccaatacaccaacctttgattttatagcatttaaatcaggtatgtcttctaaattggttaatacatctggatttttactttggacagatatagtcgctgtaccatacataccttttgccatttttctttgtgcactttcataagataatccaattgagaatgaaacaaaaagtaaaactgttgataaaactatggacagtaacataactgctgttctaatttttcgttctttaatatttgtgaaaatatactttaatataattttcaaatttacaccttcttcctttatctaagatatttcagtataatatttttatactttaatccaaattgaatctctaatagactcctccatacttttatcattctatttataatatttttaatcaaatcacctccttaaataaaaaagattgataaactactatataaatataataatctatcaaccttaatatattttttatttgaccttaattaaccttaattaaataggaaaggtgatataaaatgagctacctaatccaggtatactttcaacagatatattccctccatgaacttcaataatttgcttcgttattgctagtcctaaaccagttccttctattttttgttttgtattgcttcctctataataacgattaaacaaatttgatgcttcttctcttgacatcccttttccattatcagatataatgatttcaattctttcatttaatgttatatgtacacaaactttagtatttttatctccatatgtaaaagcattgacaataagattactaaaagctcgttttaatagtgtacaatcaaaatcaaagttaatattatctatattactcttaaattcaactatatttgattcatattctggataatttaaaatatcaatggataattctttcaagaatcttactaaatcatatttatttttatttaaaggaattattccattttttaattgataggttaattttaaatcgtttataagtgtatttgtatattctatattctttaacatgattgaagcatatttatatactttttcaggtgaataattagtactactatctgtaagaagctctgcatacccttttattggtgaaagtggagtttttaaatcatgagttatatttgaaatccactcttctctcataatatcagttttattttgtatctcatcacttctatgaatttcttcatttaaaatatttaaactattatatatatcagcaaaaacacctttaatattaactggaagatagcttcgttttgaaatatcactaacagcagatgtaatatttgatatgcactttgttacccagtaaccataagcaattccagaaatcaaaattattaaaaatataatccctatgattgaaaatacaattgacttaccacctacaaatttacttccatcaaaaaacatattcactttagatatatttaatggaaaatatataatataaatatagtcatttttattatttttaattgtattaaagtatacagttccattacttgaattattttggttagctaatgttaataattcagaattagaataataatctttatgctcttttggttctaaaaacccataaactctatttccactagaatctaaaatttgcaaccacaattgattttctcgaagcttttctaatccagactgttttacttgtggcttattatctataaatatgatttgttcattaaagttttctgtaaattttttcggccagtcactacgaataaattccccatttggtttctgaatagtaataagtgataagaaaatacctattactgtcaggattaagcaaataaaaatcatgaaaaaaataatgtatgaatgaaatactgttttataactaggtttatgcatttaatcaactcttttcttaaacttttattttagtttgattgttgcttatataaaatagataataattattgatatgtaaaaatttatttaaaaatacaactatctacataaattatatttatataattatatgttatcaagctgtctgttgtatttaataaatccttttgataacatataaaagcaagataattttttccattaaataccttataattatacacaaaatctctatatacgttaaacagtatagagaaaattttcatagaaccatctttataggggatactttataaaagaataaaaaaattataatatataaaaaacttcataggagtgtaacaacatcagtaaagatatgaaaacactatataaaaattcaaaaatattaagaataatgaaatacttgaaattgcttatatcaagaaattttatataatataaactggtcaaatatgttataatattaaattgtgacaagttcatggaggtgtttatatgaaaaaacaaaagtcgccaattttacttgaaatgcttggactatttttgggttgtatatcaatgagtattggtataaatatgtttttaaaaccacatacaattgctcctggaggacttagtggtctatcattagtactaaacaaggttacaggacttccagtatcagctatcatgttaattataggtgtcccattagtaatacttgcttttagaattatgggtacaaaaaattcattaaaaactttatttggaacagttgtattttcagctatagttcaattaacagacccattatcaaaactaagatttactaatgacttattattgtcttctattgcaggaggaatcctagttggtataggtttaggaataatgtttaaatcagatgcttctactggaggaacagacttaattgcactcatacttagtaagaaattcccaggaataaaagctacaaaattcatgtcatgcctagatggaatggttgttatatcttctggtatagtaaatcgtagtttagaaactgctctttactctggtatagcactttgtgtattaataaaaatagcagatatgataatggaaggatttgaccattcaaaagcattttttattatctctgatgagcctgaaagtttaagacaagctataactgaagaacttgatagaggtcttactattcttgatggtaaaggtggatacactagagaaaataaagaagttctattagtcgtagtttctaaaaaacaagaactttatctaaagagattagttaaaagaactgaccctactgcatttgttattgttacagatgtgcatgaggttcttggagaaggatttaaaaatttagagaactaataaaaattaatattttaagtatatatactattttaattaaaatacgatttattcaaaaagagtgtctcataaactttttagttcatgagacactcttttttgtataaaatcaaatgcattttcagtattttaacaataaaaaacaggattatctatattttgagtcaactactttattgaaattttatttagaaaacaatcattactaaataaccaggatagatattaaatgattatatctattgttttttcaattcatattgataacaaggaacattttttacagtatttccagtatgaatttttttgatatactttcctgtacatttaaatcctaataaatctaatgattttgtagaattttggttttcttcataggttattgcaattattttatttaagtttagttctctaaatccatactgtattactctttttgttatctcagtagcaaaatcatgtccccaatagcttggatttatacatatacctatttctgcttctaatgctttaggatttatattattaaaccccatattcccaataactttattgtctcttttatatactatagcaaagtggccaattttcccttttttatagggatttagaaaaaatgattttataaactttcttgtatcttctaaagatttatgctcactaaatggtaaatgttttactactattttatttttataacagtcaaaaaaatcttcaacatcatctaatgatgcaggtcttagtatacaacttctagtttctaaggttttcatttgaggatattcagaatcagacatttctaatccccctttatacattaatctaaatatactgttcatatttaaaatacgatattaattatataaatgttctcaaattaaccttatctttatttttaataaaaactaattactatatgaatctttcaaatttacgaatttatctctatttttatattaaattacttgtgaaatatgtattctaaattatatgttattagatatcatgcttaaaaattctttggttgctaaggataaagatatatcttttaaatggcagtaacctatatttctcttaggtattggctcttttatatctaatttaaacaatttctcattttccaaataatctatgctaaattcttctataacacaagacactccaagatttatatacgcaaattctaaaagtaattcatgagaacccaattctatatccgggtttagttttataccttttgataaaaaatattcatttacataaagtcttgaatttgctttattttctagcattattaaaggcaatgtgtttaattcttccaatgatattttcctacctttgtattctatgtaatcatttgcacatacaaatatatcatgtatttcaatacactcaacaatatttagtgtatcatcttctattggcatgtttataattgctatatctatattcccatctttgagtaaagatataagttctctactcgttctatttattgtagatacatgtatatgtggatacttcttatgaaaaatttctaaatattttaacaagaaaaaacgtgcagctgtatctcctactcctattttcagagaaccgtattctaattttttaaatttatttattctatcttctcctgatgatatcaactttaatgcagtagtgacatgttcacttagaattttcccctctggagttaattttactcccttattgtttctataaaataataaagtatctaattgttcttctaattgctttattgactggcttacagctggctgtgacataaacaattccttagcagcaagagaaaaactcttattatttacaactgcattaaaaaccttataaagttcaagttttatattcatatataattactccttatgtcaaatattagtattatttattttacttataattatatttgaattataatatacatggtactaatatgacaatattaattctttaggaggattttagataatggatagattagttggaactgtttcaagaggggttagagcacctattataagacaaggagatgacttagttaaaatagttgttgattctgttttaaatgcgtcaaaaagtgaaaactttgaagttagggacaaagatgtaattgccgttacagaagctgttgtagctagagcacagggaaattatgctcacgttgacaatattgcaaaagatgtaaaagataaatttggagatgatactgttggggttatattcccaattttaagtagaaatcgttttgctatatgtttaaaaggaattgcaaaaggatgtagaaaagtcgtattaatgttaagctacccttctgatgaagttggaaatcacttaataagtattgatgaacttgatgataagggaataaatccttggtcagatgttttaacagaagaaaaatacagagaactatttggatataacaagcatacatttactggtgtagattatgttgattattataagaatttaatcaaggattgtggtgcagaggtagaaatagtatttgcaaacaatccaaaaactattcttaactatacaacaagtattttaacttgtgatatacatacaagacaaagaacaaagagaattttaagacaaaatggagctaaaaaagtatattcacttgatgatataatgacagcaagtgtagatggtagtggttacaatgaccagtatggacttttaggttcaaacaaagctacagaagaaacagtaaaattattccctataaattgcgatgaagttgtaaacaaaatccaaggtaatataaaagaaataacagggaaagatgtagaagtaatggtttatggagatggagcttttaaagaccctgtaggtaaaatatgggaattagctgacccagtagtatctcctgcttatacaaaagggctagagggaactccaaacgaagtaaaattaaaatacttagcagataatgattttgctgacttatctggtgatgagttaaaagaagcaatttcaaaatacatagttgaaaaagataataaatctgatgatttaacaggaaacatggtttctcaaggtactactccaagaagattaacagaccttataggttctttagcagatttaacatctggaagtggagataagggtactcctattatttacatacaaggatatttcgataactatacaaaatagtatgttttaataagatttaatttttttggattatatatattaacatgaaaatttattaaaacctcttaatagatatgacttttcaagagttatatctattaagaggtttatttaatgttcacagataagatatatttaaataatttaaacaagattgtcataaagttatataatcttaaaaatttatataactctaactcttatttatttctgaaataatatcactcttcaaaatttgtcttactggaataattacagcaactatactaatagtgatatttaaaataatcatacctatgtatagaggtgtatttattttaagaattggatttatatataaatatacacgttttaccataaaataaatcataaattgtccaataacacttccaattaccattataatacttgcatagaatccatataaaaaaccttctcttatcatcataagtaaaaacttattatccgtaatacccatagctcttaaaattccaaactcatgtcttcttgaaaaaattaagtagcttactgtattgattatatggaacaaacttattgcaagaagtacaaatacaataccatatataaataagagtttttgatttaagtaggtattatttttttcaatagcaatggtataatctgttacgatacatctttttacatcacttacaacactttttatgttctcagacaattcctcactgttactatcttctgtcttttttatacttactgaattataattttcgatatcaaagttatttttcatttgcccattcgtcataactatatccataccataatcaccaatgaaatatatgttatttgccatcacacgttttacagtagcagcaactacaaattcttttgttgtataatcattcttattttcttctttaaatttaacaatttcacctgttggtttcattgtctttggcactttaacttttattgtatctcctggatttatatcaactgcatcatacatcccagttccatccataggtagtctaactataaccttattatttttaaccatatcatgggtattaatctccccatctataatataagaatttaatccttctaacataccattgttataaccataaatatttgtttttaaaagatagccaccttcattttgctttgtacaaataccatcaaaaaaagtctttatcctgtaatctttttcaagaggtttaaagaaatttttccaaaatagttgttcttctttaatttgcatagctccaaataaatatcttactggatagacttttgatattccctcaacattgtttaatcttgaaattttatcttttggtatacctacatcaaaatctgttgtttgcatagttatttggtagtcagaatttaaaccatcatcagctttcattgtaagttcattattgtttttagtaagctgtatagagtaactagaacatagaaatataattccaccaagtgataatgaaaacaaaattccaataaacattccccttttttgagtcatgtatttatgagataatacttttgtcatgttagagtgttttacactttctaatattctctttttcttattagtaatcttaaagtttttcatagattctatactagagtatttattcaactgatgtacaacacgtacagcaattaaaattaacaacaataagataaataaaaagcctaaataaatagatttttcacttataaaaaatgctcctggaacaatatcactactcaaaaatatatgtggaaattgttcatatattgtagacgctactccaatacctaagaagcaacctataggaaatccaacaataaaaagtaaaaataactctaaaaatagtagaaataaaagttgtttattattagcgcctaatacttctaaaaccccatattgtgatattctctgaagtattgaaacatggaaaatactatatactgctgctgcaccaaacactccaacaagcaatataattgcatttgtatttagttctaaattttttaagaactcaaatatattatatttttctatattctttggtggttttactccaaattcaactgaaagaggccagtttatataagttttttcttttgatatgttgaattttttcataaatttataattttgctttttaatatttttattttcatcatattttacataaactatataagaatccttttctttaggctgcaaataatcgtttacaaatccctccatagcagtttctgggtttgaaagacttgataaaataccacataacttatagattttaccatctaaattgatttctgttccaatttctttgtttacatttaaattgtttagagaatatgtgtcaagtactatctctccatctttactaggaagagttccttttaataattttctacctgtcatgtctaaatatgaagaatcagcatttaaaaattctataataaaaggttcatctatctgatttttaggttttgtaacgccaagtctatctacaatgtattcctttgattttttattttttttaattttattaagttgttccttatctactttatagaaataatgataatctccactatcttcccttatcttttcaattctacttttgtctgcactatgaactaaagaaccaattcccgtcaataatgctactgatagtactatgcttaaaactatagatatagattgttttttataatgctttatatattgaattgaaaattttactagagacatcatagtacttcaccaccagtattcaccacaactccatcttcaatatggataattgagtcgcatacttgtgctatattttcattgtgtgttaccataagtatcgtttgatggaattttgcactactttcttttaataaacataccacttccattgtagttttactatcgagatttcctgttggttcatctgctaatataagtgcaggtttatttgccaaagctctagcaattgctaccctctgttgttgaccaccagatagttcgcttggaaattttaaacgcttatcccaaattcccaatgtcttcatcagcatttcaatatattcatggtctatatggtttcctttatctaatgtaacaggaagagctatattatcataagtgtttaatacgggcattaaactgtagttttgaaatataaatcctatatttcttcttctaaatactgtcaaatctttttttcctattttagatatgttctttcctttaattattacatcacctgaggttggattatctaatccacctataatatttaacaatgtgctttttccagaaccagaagttccaactatagcagtaaatgtatctcgttcaatttctatacttactccatttaaggcttttactttagtctcaccttttccatagtgtttcactaaattattcgtcactaatatactcatttaatttctcctttcaatacagatatatgttctataaaatattgtaagtgacgataattacactcatcctacaaagttagtttaaactcttacaattctgtaagaatatactaaaacaacatccacttcctagtttagattctactataatgtttccattttctttttctaaaattaatcttgtaagatatagaccaatccctgtgccattttggttttccacatttttacttctgtaaaatcttttaaaaatatcatttagttctctactatcaatacctattccttcatctttaatagtaatcttcgtatatagctccatttttattacagaaatagtaatcgtgctatctgatggtgagtattttattgcattttctaaaacatttacaattgcttctatggtccactttttattatgaactaactttatatctgaaaatggttcgagatttatccttatatttttagcttctgatttattaaagatagtactgatgctttgaataagagtatctttaattagtagttcttctacttcaaattctataactccatcctctaatttagtcattttaaataaggattgtaacaaccagtcaatcttaaaagtttcatttttcatcttttgtaaaaactccttcttctgtaatgtggaaatatttatattctccagaagttcacaataaatggttatatttgaaagtggagtttttaattgatgtgacatatttgatattaaacctttaatcgcttctttttctgactttgactgttctacctctatttctatcatatccttaattttttttacttggtgagaaatttttgacgctcttgtatccttcgtatctggataagtaacttctttaccttccaatatttgatttaacatcaaatttaattcatcatatcttctttgatttattttagtagatactataaatataacaactgtacatattataaaggctaatataaacatattattctacctcattccataaataacccattccataagctgtttttatatattttggattagatgggtcatcctctacttttactctaagtcttcttatatttacagatacaatattatcatcaacataattttcttcgctgtcccaaatatggtgtaaaatttgttcctttaataatatctgacctttattttcaattagataacttagaagcttatattctacagagctaagttccaaacatgctttatttttatatacttttagtaacttttggtccaattttattccattggaatatattactttattattcgatttttttcttattgctactttgactcttgcctttaatacagataaagaaaatggttttgtaatataatcatcaagccctatttctaatccttttacttcatcaatttctgagtctcttgcagtaagcattataattggtatatctgacttttcccttattatttgacatacatcaaatccatctccatctggaagattgcagtctaagattataaaatctatatttttactattaaatatatttaatccttcttgttttgtataagccttaaatacattaaatccatcattctcaaatgcataaaaaagaccttcatttaagtttatatcatcttcaataattaataagttcaattttactctcctttagattttttagataaataattattttcttgcattatcatactaaaaatattttaattttatttatttcactaaaaagattgtatttaaatttgttttcaaaataaaaacatcataatcaagcatatagttatatatttcccaatttaattacgcttaaattgaaaatataacgttattcttatataattaaattatacaacaataaagttatattttttaaatatatttttactagggggaatagaattgaaaagggttgatgagagaaatactatgtttgcaagagcaaattacaaaaaagatagtactgcttataatgattattataagaaaaatcctgacaaaaaagaaattgatgatagtataagaaatagaccaaatttatgtagtgaaggaacaatgacttacaatgagttaaactctccaatggcaagtagtgcattcgattttttatctgatatcaaatctttatgcgaaggaaaagtttctgatactaaagtagatgtagatgcaaagtcaatgacaaaaaaaattaagggtcttgcaaagcagtatggagcttctgtagttggtataactaaattaaaagactatcatatttatacaaataggggtagacatgaagaaaattacggtgaagaaattaatctaactcataagtatgcaattgtatttggatgtgagatggataaagaaatgataaatagagctccaatgatatgtgaagttatagaaacatcaaagtgctatgtggatgcatctatcgtcggcatgattttaagttactatataagaaatttaggatatgatgctagaaatcatatggatgctaattatttagtaatgcctgtttttatagctcgtgatgcaggtttaggagatataggaagaaatgctatacttacaaataaagattatggctctagacttagattaggtgttgttactacagatattcctcttttagaagatgaatatgttgattttggactagaagatttttgtaaggtctgtaaaaaatgctcttttaactgcccttctcattcgctttctaatgatattaaaattggtgatgatggaaaatataattgggtaattgaacatgagacatgctatattaaatggagatatttaggtacagattgtggtatgtgtatatctgcttgcccatttagccaaaatctcgaaactataaagaatactacttcatttaagggtaataatgagcttattcaaaaagctttagatgagtatacttcaaaatttggtaaaagaatatttatacctggaaatccatcttggttgaaataattttatttaataaagaatctgtactagaatttatcataggacaggttctttattaaatatataaatttttaaatactttttctcgtttataacaattcagcaatgtttttagtctataattgacattataaaatattaaactaaaaggagtaactgtatggaaaaaatattagtagtagaagatgattctatattaaataaaactctatcatataacctaattgaagatggatatataattacttcaaaatttacagctaaatctgcactaaagtctatttttgaatgtgaatttgatttaataattttggatattaatttaccagataaaagtgggtttgaattatgtaatgaaataaaggaaaattacaatataccaataatttttttaactgctaatgatatggaatgtgatatgattaaaggctatgaacttggagctttggattatataacaaaaccatttaatatcaatttatttaaacagaaagttaaagcttttttaaatcatcttacaacaaaaacaaaacaagattactatagggatggatatcttgaaattaacttttctgagttatctgccaatataaatggaaatcaaattatatttacaccattagaatatcgtactttaaaactgcttactgaaaatcctaaaagtattttaacaaggaaagtacttttagaaaaactctgggatatagatgctaactttgtagatgaacatactttaacatctgttataagtaggattagaagcaaaattgaaaaagacaatcttaagtatatcaaaacggtatatggtatgggatatatgtggttaggtgaaagaaatgaattttaaaaaattttcttttagttctatttatttaataattgctgttggtataatttttacagctattttatttaatatttcaatttatctaataactgatgatttaaaactaattgctctattattaatatatacaatagtactttgtggatttatagcattaataatatttttacttcataaaaaaatagttatattttgttctaaaatatgtcacactttagatagtatgatgaatagtgaagacaatattgaaattgaattagaagaagaaactattttatcacgtatcaatcacagattaattagaatgtatgaagttattcaagaaaatcgcaatagtattgctatagagaaagctgatttacaagaactagtttctgatctatctcatcaaattaaaactcctattgcaaatttaaaaatgattaatactactctactaaatcaaacatttaaaacagaaattcaaaaggattttttaatggatatggaaaaccaattagataaattagattttttaatgcaatctatggtaaaaacctccagactagagacaggtataatcacactatctaaaaagaaaaattcaatttatgaaacaattgctacagcacttagtggaattttgtttgatgctgaaaaaaagaatattgaagttacagttgattgtgacccaaatttatatataattcatgacaagaaatggacttctgaagctatttttaatatattagataatgctgtaaaatacacaaattctaatggtaagatacgtgtagctacagaatgttgggttatgtatacaaaaatagatattattgataatggaaaaggaatatcagaaagtcatcaagcagaaatctttaaaagattttatcgtgaagaagatgtacatgacatagaaggtattggaataggtctatatctttcaagaaaaattatatctcttcaaggtggctatattaaagttacatcagatattggaaaagggtcgactttttctatcttcttacctaataaataaatttttaaatattttatttgtaatgattctgcaacattttgattttatactgtatttacaagatgttaaggaggtattattatgagtattttacaagtaattaatttaaagaaatattatggacaaagttcaaacattacaaaagctcttgatggtgtaactctatctattgaaaaaggcgaatttatttctattgtaggtacatctggtagtggcaaatccacattattaaatatgatgggaggattagataatcctacatctggaaaggttattataaagggtaaggaattatctactatgactgatgaacagcttacaatctttagacgcagaaatataggttttatatttcaaaattataatcttgttcctttacttaatgtatatgaaaatattatcttaccaataggattggatggagagaccatagataaggattttataaatgaaattataaatatgctttctcttgaagaaaaattatatgatatgccaagtaatctttctggtggtcaacagcaacgtgttgctatagctagagcacttgtaacaaaaccagctattatactagctgatgaacccacaggtagccttgatagtagaactagttcagatgtactgagtttacttaaagtgacaagtaaaaaattcaaccaaacaattgtaatgattacacacaataatgaaattgcacaactaactgatagaattattcgtattgaagatggaaaaattgttaactaggaggtgtagtatatgtttagaaataataatcgcacatttataagaaaaatagctttaaatgatttaaaaattaataaacttaaaacatatctttcaggtatcattataatgatttctacatgtttattattaacagtgaccttagtttcatataatgcttctgtagatttagttaatgcatctccatatcatgctatatataaatctgtagatgaaaaagcaaaaaatatactatataaagataaaaaccttagtggcgtaggaacctacaaattaattggaagtaataaaaagacagactgtattatgtcgattgtttatgcagatgatacagcaattaaacttatgaattttcaaccattgaaaggcaaactacctacaaataaaaatgaaattgctatttcagaaaaatatttacaggaatttggtttagataaagatattggagatagcattaaattaaattattatgatgatattacgaataaagaagttcaatgtgattttattattgttggatttctagaaaattattatcaagataatgccaagcaatactatacagtcgtttcaaatgattattttaagaatatagcttctacacctttacaaaataaaagtaatacttttgacgagtcaagacctgatactgtagatgtattagttaaactatcagaagaaaatacagagaaagattcagcttcaattaagacacagttaaagaaaattggtttatctttaggtattaagaaatataatatatacttaaatgataactatattgaatcaaatttaattgatggtgagcagattattacagttttagtagttggaatagttgttcttttttctagcgtttttgttatatatagtattttttatatttcagttgttaattcagttcagatgtatgctaagttgaaatcgttaggtatgacttcttttcagttaaaaaagactatttctctacaaggaaatattttgtcaattatttttattccattaggggctatagcttcttgtataattgcttacataattcaaccattagcatggcaaatgatagctgatttatttataattttaattttatcactggtaatgtttttaactgttagaatttctttatttaaaccagctagaattatttctaaaatatctgctattgaagccatgcaatatacagaaactaaatttagaaaacaagcaaaaaattttagttatataaatataaaaaatctagcattaaagaatatcgagtcaaatagaaagaaaaatttgattgcattaatatcgctaagcattagtggagttttatttatttcaatcgctaatcttgctaattcaatagatttcaaaaaacaactatctcaacaatttgtctataacgaagattatataattagcattaagagtgataacttatatgagcatattacagaaatccaacaaaataatccactaacagattctcttaagaatgaaattaaatctattcatggagtaaaaaaattaattgaatccaaatcaattaaaagtaatattatagaaccttacatcaaagatagagacgaaaaacaatttattactctaattaaaggtattacgcctgaactttcaaaatcacttgaagaatatattgtcagtggaaaaatagactatacacatttagattcagatagtttaattataaataaatatagaacaaaatcttatggattaaatttaaaagttggagatacagttacatttaatatctttagtggaaatgatattattaaaaagaaaatgaaaattataggaatcattgacaattccaatacaggaggtatgttttttgcttcagacaaaactttagaatctctaacaccatataatacaaatttagatttttctattttaatagataaaaagcattctaaagaagttgaagaaaagttgttaagtataattcagaaaaattcaaatttaatgctttattcatatgaagatgattatagaatgattactagagcatttcaatatataattatagcttcatacatttttgttggtttaatttcttgctttggtatactaaatatgaccaataccctaataaacagcgttttaattagaaaaaaagagtttgccttacttcaagccgttggaatgacaagaaagcaactgcgaaatatgctttatagagaaggtctaaacataagtatcaaagctatatgtacttcaagtatactaggttattttggttcaaatctactttgcacttttataaaagatgtaattagattagactttattaattttaaattttctatatttactattttaattttttcattcgtattaattggtatacaagttttagtgactgaattacttataagaaatatagaaaaaaaatcacttacagaacgcttacgttctcagtaagaatgtatataaaaaataaccattttttatacaagttttaacataattttttaaaagctaaaaggatagaaaattttgactttacataattttctgtccctctacttgtttttattttatacagatacacttccttatatctccaagcaacatcaccagagacataaacaagcatattccttattttctaaatatgtcaattgcatgacttgtaactcctactaaatcttcacgttcacaagtagcaaggtgatattttaaatataacgcaaatgcatcatcatccatagagtctactgcttcacgcatatacaaagccaaaccatctgatgcgacataatgcagtctagttacattaaatgcagacatcaaatcatcaatgttttctttacgtacaagctcaaacaaatcctttggttcagacttagcagcaaatgtctgtggatcaatcaaacctttttcaatatattcagatacattaatatttcctctatggaacccctcgtcaatgagacagccatcagatataacgtatgcagcaaaaaccacaccaccaggttttgttacacgaattgcctcatgtaaagcttgttgtttatcttctttgttataaagatgatatagtggtcctaacagtaacgtaatatcatatttattatctgggaaaacagataaatccatagcattaccctgagtaatgcttatattttcatttgattgagtatttttatggaaaacctctatattatgttcgactaattccactgcgtcaacatcatatccctgacgtgccagtgtgtgagaataacgaccagttgcagcgccaatttcaagcacacaatcacctgattttatgtacttatcaatgtaatgcatagtagtgagaaattccaccattccatgttttaatgcaagtcgactatcttcatcataagtattataaaagtcaattaagtattgttttgtttccataatctcacctcttctatattagttaataaacatcaaatagacaaattccaatctggtttttcttgtcttataaaagctgttaatatatttttcaacattttttcagcactatatctatctaatgttaatttttttgttgctgttaagacagctatgccatgagtataaagaaataaatctaaaaatattacttttgcacattccaactctattccaatgctttccgaaaaaagtcttgcctttttttcattgtcaatttctttataaaaatcattcgcctctttcatcatcaaatctaaatcatttataaataacaacttaaataaatacgtttcttcttgagcaaattcaatgtatgaaagcggaagcagtaaataagggcttacacttttagaattacgataattaacaacatactgattataatattcatatgcaaaagcaagaaattcattttttaattcattcatgttttcgtaacaagtaaaaattggtcgagtggaacactgtaatttacttgcaatactcctcgcatttacagcttcaaatcccacttctcttgtaatatccaagactgtattcaaaatcatttcttttgttatctttactttaggtggcatatatgttcacctctccattaaatttttataaaacacatatgttatataactatagtaacatatcaagaaattatgtcaagaaaaagctttgcatttttttgcaattcctaaaacttataaataaaacatgagttgcaattaatctattaatagataacagcaactcatattttcctttaaatactcttctttttgtctaatatttcatatacacaatcttctattgaattaatatctttttcttttctttttttagaatcaattaaaatgaaatacagtataaaacctacagcaagtccccatgttccgcctttagcagcaattacacctcccataagtccaatcaatcccttctcaacacctgtattacatagctccattgatagctttgtacataaatatccttgaactaaaagtgttactgacaatgctaatggtataagaggtgtagcaatctgcgcaattggataaaaacagataaaaattgctgaaacccatactaatgtacccatgccactaaaaacagactgcatggcttcctttccaaccttgtacctttgagcaacacttcctgtaagtgtcgcagctaatggaccgcacattggtatatatggagaaaagattgccataaaaatatttcttatcccacttataacattagacctatttgaattgaaatctatatattcatcttttctattttcactttcagaaagtactaagttttcacctgttataaaatcaccaaaggcaattatgtatatcataaaagccattggtatcccttgtataaataacattacacttggaaaacctattccaaaaggagatactgtatttatcagatttttaaaatctactatgtaaactaaattgtcaaaactaaatctaggaatttctatttctttactaaatatacctactattaaactcactaaaatagctgatactacaccatattctcctaaatgaaataaaaatttattcttaacttttagagtatcaaatctttcagaaaacattacaaaacaagcaaccaaaattcctactgttatagatataggataagaatcaaatctccctttaggattaaactctgatattatagtcgatataccgacacccattagtattccacctttaatagaatttggtatcttactaactaactttccagctacaccagttatacccattaaaataaatattattcctaaatctatttgtaaagctgttaatgcttgtattctttcaatgcccatgctgaactttaacaaatatgcagttgtaagagttatagaagctgtaatccagccaggtacaactgggtctcccataaaaacatgcaaacagtataatattgagttaataatagccatactccatgccacttcatagggtaatcccaaaatttgtgtactaaggccaattgtgcctaaacttgtcatacttgatattataccttgaatagcttctggtttctcaaatctgtaatgtataaatggaattcttatcttaaacattccaaattttatatgaggttgttcccttctagcgagtctttccataacttcactccacctttcaataactcttataagtttacaactttataattgtttataaattgtcaatgtcattaaaattagtatataacatgcaaattatataaacaataaattaaatctataaaattgatagattttgtgcatatatagaaaaaccgcttcatttttagttacttaaatcacttaatattagttatttaaatcacttgataaaagttttttataaaattcaatagttctattccatgattcaaactgtccttttgaatttccttctacagttccacctgaagaaaaaatccctccactcatactcatacataaagtctcctttagaggcataatatatggaattggtaacggatgacccatattattgtatgttaataattctacgttatatggataattattttcttcaaagatttctaatgcctctaaacaagcttcataactattccatatgttatcttcttttccagcaatcataagtatatctgctttggaattttctatttttattctagcctcttttctattctctgctcttttaagacttttcttataagtactattaaatccaaatggaataccttttgatatattttttttctgttcttcaaagaatatatcattgtctactttgatatatggaaatggctctcctttatatgaccatgatgaagtatcatttccactcatcaatccattaagagcttggaaacaataaatgtgaggttgtgatactacaacctttttaatttgttcatatcttgaagcaagtaaaaaggccaattctccaccctttgatgtcccatgtacaaatatttctttagtactggtaatttcattttcactaatccactcaaatactttttcaaaatattctaatggaacctcttctaatttatctggtaacccttctaaagcaaagtatgcaactgttagtacattgaatcctctagatgcaagtggagctgctaaaaggtctagagcgtctaaatttccatcagaaccacctagcattaaaattgttttattattagaattttgtttataaaataattttcctataaactcatcagatatgtattttgtggtaatatcttctgatttaaatattctctttaattcaacttcttttctttcagtagaagtttcaaatatcatattcataattattggtttatcaatagatatattttctgcaaaatttttaccttcagttttagatttttccagcgaataaattaaccccatacaattatcagccttataagtaccttctataggttcaactaaatctaaatctacttctcctttttcatttgaacaaaacactccataagatgaaaattcttctcccttgcaccatggaaattccattttcacacttattttaagtttagtatttggaattaagtctgaaaccataatcttaagtctttcatccacaaatgattctacattgtatacatttactttcataatctatttctccttataataattatttatgctttatatataaaacaactttatctaatacaacataaataaatttttaaattaagacaccatattgactatttcattttatcaacatatttcatttttgtcaatatattgtcttttttagtaatttaaaattatgtagtctatatgaaatccagttgatttttggctaattaaagataggaatgctattaggtttaaaatatatctattcaaaataaaaaaccactcattttaagaatggtttttaatataaactatttgttattaataaggatatttttttatttaaatttatataattgaacatctaatatttaatgtttaataaaattatgcatttgcaaaagtatatatggcattaactcttgctacatataaattctcatcactacatccaatatatctagcatatttttcaatcttttcttttgcattttcaacatcattttcatcgctctccattaactcatttatataaatatccattaatgacgctttatattcttttatatcatagcctaaaaattcagtcaatctctcaatttccttactaaaatctccatcttcttttaccaaaaattcgtatacatcttccctatatggatttaaagttattatttgttttactactttgcattcgtcagccttcccaataaaaccatctttataattattaaataaggcattagatttttttatagattcttcatcaatataagaatgtaccgcagttatacgattttctataagggcatctacaacagcataatgaattttaaaacaatcattgtataaataattgctcattttctttattgtcgattctatttctaagaagctagcgtgcccattttttttatttttatttggtataataaaagttttattcaagttattaaaaagtctcttaaaatctaaatatttttcacaataaacgcttttaaaggtatcgatatctatagttataattccaaaacttactatagtctcaattcctttcttaaaagactcttctatatatttttctcctaaacttaaacctctatcagatatttgctttagattttgaaaactatttaaacaatctctctcaaagtttttagatatttctaaagcatataatttaaagattttccttatcttattataattattttttgtatcatcaaatctgataatagctccatttacatcaaaagtaatcattgagttttaacctccccattagtttcatcaataaaataaatttaatataaactttataatcataatattaaacttatttatactataattattaatttgatgataaaagctattttccttctaaataaaaaatttgtctaaagtttctaaaaaatttagacaaatcttaggttattattctttaaattatttttaaattattccaaatacaccaaataatattggtataaatatagctggtaacaaattagctacttttatattcgttaatttaagtacatttagaccaagtcctataattaataaacttccagctgctgtcatttctgtgactacaggatcacttaaaaatccatttaaaaatgatgctcccacacatataataccttcatacaaaaatacagatattgcagaaaacattacacctatacctaaagaagcagtaaatataattgaagctattccatctataacagattttacaaataaagtatcatgacttcctgtaagaccactttctaatgaaccaactactgccatggctcctatacagaataataaactagatgatataaaaccctctgctatagaatcttttttatttcctttagaaaatttactttgtaaaaaagcacccaacttatttacccatttgtcaatatctattaattctcctatcagagcacctacagctacggatattattgtcactaatgtgttttttccttctagtgctcctgatataccaatgtacaatacacataaggcaattccattcattatagtatcacttactctttgaggtaatcctccttttattataagacctactatacatccacctgcaattgctagactatttgctattactccaaacattttttctcccctcgattagctaattgaaatttatcctattattaaaacctaagcatctatactttgtattggatattttaaatattccaaaaattcttcaaaaccttttctagatatatttacagttttagtatttatgttaggatgaaaatttaagtaatcttctttaattacatctttatctatgtaaagctcaacttttctttctgtatcatttattaatgaaaaaggatttacacttccaggaagaagtttaagtacattgtatagtctttcaggtgaagcaaacgataatctagaacttcctatcttatctttaagtgagtttaaatcaacttgtttttctcctttaactacaataagataatacttatttcctttggcatttcttaaaaataaatttttacattgacacccctttgttattccatctaaaatgactaattgctctgctgtatatacagcttcatgctctactacatcatattcaacatttaatttatccaaaatatcatatattttagtttcattcatgctagattcattttcatcttgttcttttttattatttaaatcactcatacttttctccttaaacacttcatcataatatcattgtgaggtattattctactatagctattgctcttactggagctccatcagcatcattatacttaaatggtgctgctataaatagaaatttttctggaacattttctaaatttgtaagattttctatgattatttttcctttttcaaataaaatatgatgcacttcaaatactgatgtgttatatctatccactgatagcatatctattcctatgccttttatattagtattagctatatagtttgcagcttcttttgttaatgtaggataacctacatagtactgctttttatcccaaaattttgaccaacctgatttaaatattataaaatcactattttttatttcatcttcatatttttttagatattctaattctatattctcatttcccttttcaagttccaatacataagctttcccaacaaaattttctatatccaacttatctagggtctcacctttagtatacatatgtcttggtgaatccatatgagttccattgtgagaaaatacactaattaatgtttcttgataaccattttcttcaataatagctactttcttgatatctggtctattaggctctgcatatacaggcatgtcattatgtgtcacatgagttaaatcaaaaaccttcatctttatataccccctatgtttttattttctattatatacctaaattcattttatttctatcagattttattccattatataccatactactatatattttttataaacctcaagggatttaccgaaaaatcttggaaagaattatcagtaaatataacatcttcacccaaaaaacgtttataccttccttcttctttctttaaagtaattctctgtttttgtgaatgattattaaaaaccattatcttaagaggaggtttttttctattagtctgcactctttttaacatgtattttatgtgcatatcagcttcaggaaatgaatatccacaaaatattaaaaggtcagtatctcttaaagttttttctgtttcattccaaacattacttaaaaatatgtttgacatattcttaaaatatgttggtggcactataataggttctgttaactcaccacactctaaacattttgtctctgaactattttcaataagcttcatgacaccaccttcatgtggtgtaagagttacactattacaaatggggcaataaagccaattcaatgacccatgtatcttatataatttgattaatggttcttttggttttctccaatttaactcctctttaaaatttgtaaactccacaccataatcaagcataattggcaaatcattcttatctcttaatccagtaactgtattgtctatatgtatatcataatttgcactaataaaagtagtatcaagaagcaaatcattttccaaaagattttcaactaaaagtttatgatatttattatctgttctaggtgtattatgaattgcttcagccattagcagtattaaatattgtcttaaaaaacgtatactatcacttctgttatttagattttctagtccaaaatttctaaatgcttcttttctttgttctgctaagtctaaaagacctaaaacttcttcaaaggtaggaaaatttgcattatctatattatcttttactatatcaatattgaacatctgtttaaagaaaatatacaattctctattcattttggtattataatttgtgggatttagttttttaaaatattcgctaaaaagttcattttgaataggtagattctctgctgctgaagctcctgctcctaaaaatattgctattttcatatagttcctcctaatataaatattactcctatttttatatccattaaatatccatatcatttattttatgatacaacaataaagctgtcttttactagaaaaaatcctattacaagacagccttatattatattaaatctttaataattcgtaaatagaaagagcatatatttgagtagcttttataatatcctctactattaagtattcattagcttggtgttctgtttctggttttcctggaaaaatagctccaaatgcaacacaattatctaaagctcttgcgtatgttgctcctccagatgaaagtggtgttccatcaagaccagtttcttcttcatatacttttctaagtgtcttaacaagaagagtatcttctggaacatagattgaatccaagaaatcatattcttcataatttaaattgtatttatctgtcattttctttaactcttttacaaaatcatcctttttgtatgttactggaatccttacatctattcctgcaaattctttttcgttatcaatagttactctacctatatttactgttagtttacctgatacatcatccttgcaattaggaattatattgtttccattagcatcttcaccaataacttctgctaaaaacttaattatattagaatctatacctatattattaagagctatacaaagtctagccactgcatttataccagtatcacttgctgctgaatggacactttttccaattatacagattttattaccttcaacagtatactcaaaatttaatttatcaagttctttttttaatttatcagagtattttccaatatagattgctttacctggaactgcatttaaagcctttccaactgacaactctatatcacttttgctatcacaagtcaaatgaacttgtaaaagacctttctctgcatttgttattgggaatctagaatctggagtaaatccatagtttggtatttcttcattattttctttatatttatttatacatctccaaagattttcttcatcagccccaaaaatgaatcttatcctcttattaaagtctacatttaaatccataagagctttcactgcataaattgctgatattgtaggtcctttatcatcttgtgttcctcttccatacaatttaccatcttctaaaacagcttcaaatggagggtaattccagctttctaaatcaccttctggaaccacatcaacgtgaccaagtatacctatcattttttcaccttgtcctatttctgcatatccataatatccatctttgtatactgtcttaaatcctaaagatttacataagtctaatatacctcttaaagctttatctacattttcaccaaatgggcaattttcagttgcttcagatataacactaggtatttttacactttcttgtattgaagaaatcatttcatcttgtagagaatttactttttctttaatttgctctttcatattatcacccttcaattttcatcataatatactaataaatattttgacctttttaaaaaaaaatatgcttattttttcagtttttttataaattcaatcgcttttaaagtccccatttttgaatggtcaaatgtaagtccaccttgaaaataaacattataaggaggtcttattggagcatctgcacttaattctatagaagaaccttgtataaatgctcctgctgccattatgacttcactttcgtatccaggcatgtcccaaggaacaggttttacataagaatcgactggtgcagcttcttgtataccttcacaaaaacttattacttcatcagcattattaagtctaatacattgaataatatcacttcttaagtcatcatattttggtaatacatcatatcctaatttttcaaaagctcttgagcaaaagatagctcccattacagcctgagatactatataaggcgccaagaaaaaaccctgaagtacatttctagttgttccaaaagtaagaccacattcttttcctattccaggagaagtcattctataagatataagctcaatcaaatcttttctaccagctatatatccacctgtcaatgcaagcccaccaccaggattttttattaaagagccagccataacatctgctccaacatcagtaggctctttggtatctaaaaactcaccataacaattatcaaccattactatagcttctggtttaacagactttattacttctatagcttcttttatatcactaattgaaagtgattttctccaagaatatccttttgacctttgtatcataacgagtttagttctatcatttattttgtttttaattccttctaaatctaagtttccatcctctaaaaaatctacatcatcatatgtaacaccatactctttcaatgaacctttttcttctcttatgcctataactccctctaaagtatcatatggtctaccagtaacagataaaatttcatctcctggtctaactataccttgtatacataaagtaagtgcatgtgtaccatttacaattattggtcttacaagagcatcttctgtattaaatactttagaataaatttcctctattttttcacgaccaatatcattatatccatatcctgtagtccagttaaagtgcatatcacttagtttagattcttgcatagcttttaaaactttatattgattatattctcttatttcttttatttcttcaaacttatcttttatttcttccattatttcttgcgatagtttaaaagtatcatcatctattccatagtagtcttttaataattcttttgtctcattaagcattttatcacctgtctctttattattttatttaaacatgtaaaggagactattttactaaaacaaataaattatagtttataagttagtataagtctcctctcaatcatcttaaattaaattaattatctatctgttgttattattattgttgttttggttttgatttgttagattaatatactttccaggttgtatagttgatacagcatgtttataaatcatgttttgttgtctattatccccttctattaatattatataactatcaaacccctttacaagccctttaacttgcactccattaactaaatatatagtaacaggtatcctttctttccttgcattatttaaaaacaaatcttgtaaatttaaaactgtatttttcattagatttgtaccctcccaagattaaattgaacttctaaaatattcctaccttatattctatataagttatgacaaattttcaatattaagttgtatacttaaaaatttatatattattttatagaatctttaatatataagattatttcattttttaattcgtctatattttcatattggtctaaatcaaaccatcttgctgttttatatcttttaaaccatgttatctgacgttttgcataccttctagaatctcttttaattatttcaatagcttcttcgtatgtatattctccatccagatacttcaatatctctttataacctataccttgcattgatatcatatcttttttaaatcccatacttaaaagtttttttacctcttcaaccaatccatttttaatcataatatcaactctcatatttattctttgatacaaatgttctctatctctatttagaactattattattggttgatattcttcattaaattttaaatcacttgaaaaatcattcattttcttaccacttagacaaacttcaagagctcttatgacccttttagtattgtttttatggattctattagcagattcttcatcaagttcttttaacttattatgcatgtaatctattcccttttcagcaagctgtttttgaagttcttctcttaattcattattggcatcagattgtgcaaaatccatattatatattaaagagtttaaataaagtcctgtgcctccagttactaaaacacattttcccttttcatttatttcatgtatatatttttttgctctttgttgaaactctgaaactgaaaatggatagtcaggcttaacttcatctataaggtaatgcttcactccttgcatttcttcctctgtaacttttgcacttccaatatccatatattcatatatttgcatagaatcagctgaaattatctctgcatctatatcttttgctaattttattgacaaatctgtttttccaacagcagttggacctgtaagtattataagtggtatttttttcataacattcctttccatatattttaaatatccaaatattttacataattcttttaaacattttttctatttctgtcttagatatttcgaccattataggtcttccatgagggcatgtaaatggattctcacacttttctagctgttccaataaactttttatttcaatatcgtatattttatcatttgcttttatagcagacctacatgccatagatgcaaatctctctccttttaaatcataattacttgtaatttcttctatattatcaattatttgaagtataaatttctcagtttcaggtactccaaatatagtaggaacacatcttaccattatatgattattgccaaaaatttctagttcaaaaccaaatttcataaataactccaagttattttcaatttgaagcatatctacatttgatacttcaataaccactgggtctaaaagtatttgcatattgatatcttgtctatagaacttctccatatatctttcatatagtattctttcatgtgcagcatgttggtccaacaaatacatagaatcgtctttgctcaaaattatataagtattaaatacaactccaattacagaatatccatataaggaaaacttgcgttttgaactacacaagtattcttcttcactgtccttaatactatctcctaagtaataatttccttcatttttaattccatcaacttgaaactcttcttgtatattatcatttgcactatcttcacttagataattaatgttttttacatcatcttctacacttgcatttaggacttcacttactgattgaaattcatttattggtttttcacttgataaagtcacaacttcaatgacttcatccttatctttagtaatattactatttttaggagtagattctaataaatcattatttcttaatttataatctgtacttttttctctactgttaatagcgattctaggttgtgtttttttatcactataagtagcatattttccaataagatttgagtgtattaatttaacctttaaaaaatctctaagttctatatacacttcttgttctttttcaaatttaatttcaagtttattggggtgtatatttacatctatacatgatgggtctacttctatatttaagaagcacactgcatgtttacctattggaattatagacttataactttctgttattgcatctatgattattttactttttacaaatcttttatttatatagatatgttgtaagtttttatttgaacggtatatattgttattacctatatatccattcattttaaagtgattgcacttaaactctacatctattatattttccgttatttcttttccatatatacttctaatagtgtttacaagttttccatcccctggagtatttaacatctgtttattgttatttgtatatttaaattgaatgtttggattacctattgcaagtttatttatcaaatcacttatgtttatagtttctgcatgagtagattttaaaaatttctgtcttgctggtgtattaaagaaaatatcttttataatgatggtagttccattagtagaacctattggttcttttgatattatttttccgccttcaacatatattttagttcctattatttcatctttagttttagtcgtcatttctaattttgatacagctgaaatagatgccaatgcttctcctctaaaaccaagagagtataaatcatacaaatcatcaatttttttaattttactagtagcatgtctcaaaaatgatttttcaacttcacttgaaggtattcctattccattatctgtaatcttaattagactttttcctccatcaattatatctatggaaattttatttgcacctgcatcaatggagttttcaataagttcttttactacagaagaaggtctttctacaacttcacctgctgctatcttatttatagtcaaatcatctaggatgttaattatatttttcatttttacacctctaagattttatttcttttgcttttctttgaagattataaagagagtttatagcatctaatggagtcatatttaaaatatccagatttaaaatttcttctgatagtatatctctatttacactatcaaaagagatttgagttaaggctacttcttttacagaatcttcttgattaattttctctttatcatcattttgcttcattaaagcaacttcatcatttaatgctttaaatttagaatttaatttatcataatccttttttatatgtttgtagtcttttactataagttcatgttctatttttagagattcatatttattcttaaaattactttgatttaccttaactaattcttcgtccaaattactattaattatattattgttttctttatctccatttattgcaacactgttgtaaacatgatttttttccaagtctttaagtatatattttgctctttctatgacttcgtctggtaatttagctaatttagcaacatatattccataactcttgtctgctccctgaggaattatttttcttaaaaatattattccttccccatcttctttgactgctattgaataatttttaacctctttaaactcttcttctaaatcagtaagttcatgataatgtgttgcaaataatgtcttacatctaatatttttttgaatatattccactattgaccatgctaaacttatcccatcataggtactagttccacgacctatttcatctaatataactaaacttctctctgttgcattttttaatataagggatacttcattcatctctaccataaaagtagattgaccttgagataaatcgtcactagctccaactcttgtaaatattctatctaatattggaatatcagcagactctgctggtacaaatgagcctatatgtgccataagagctattatagcagtttgtctcatatatgttgatttacctgacatattaggaccagttattatgttaataatgttttctccacgatttaaataagtatcatttggaacgaaattctcctctcctactatattttcgacaacaggatgtctaccatttcttatatcaagtttattattttcatttattgctggttttacatagttatttatatgtgcaactgttgcaagggacacaaaaacatctatattagctatagtcttagccactttttgtattctatctatgtttttatatattgtatctcttatctctacaaatatctcgtattctaaagatttaatcttttcctctgcatgtagtatcttttcttctatttcctttaattctggagttatatatctttctgcattactaagtgtttgctttcttatatatgtctcatctagctttgcctgtttaaagttggcttttgttatttctatataatatccaaaaactttattaaatcctatttttaatgatttaactcctgttttttctctttccctgttttctatttcctttacaagaaaggctccattcttagaaatctctcttagttccttaagttcatcactaaaatctgatttaattatgtttccatcttttatggttatcgtaggttcttctagaatagcttcatctattaaattgtatatatcatctaatttatccatttctgaaacatactcttttaggatttttgcatttgataaatttatagtatcttttaaattaggtaacttttctatcgaattttttaagtgaattaactcttttggtgttactctctcaaatgctatctttccacatattctttctatatcgtatatatttttaagtatatcatttaggtcttctcttaatataaagtcatcttttatttcttctattacatctaatctattttcaattttagatttatttatcaaaggttcttctacatattttcttaaaagtctacctcccattgctgtagaagttttatcaagtacatgtaataatgaaccttttttcttattccctcttatagtttgagtaagttctaaattagttctagtaaacatatctaaaaccatatattctgatgaattgtatatatttatattattaatgttagatgttatttgtttttgagtattgtatatataattcagaagaattgataagcttgactttattagacctttatcatcaaactttagtttttgtagataaacatctggaaaatattcttttaatatatttatatccaaatagttatcactaaaactttcatttatgtatatattacttacagtagctatatctctaagcttttctataaagtctaaatcatttataattatttcagttggatggatttttgcaatttcttcaattaccttatcttcatttaaacatgttgcattagtttctcctgtacttatatcaacataagttagacctatattagtaccatccttatacaaagataataaataattattctttttattttcaagtaaatttccatctaaaactgtaccaggagtgatgactcttataacctctcttctaacaattccttttgctgtagatgggtcttccatttgttcacctattgctactttatatccattttcaactaattttgatatatatgaattggctgagtggaaaggaacaccacacataggagcacgttcttctaaaccacaagcttttcctgtcaatgctatttcaagagcttttgaagctactaatgcatcttcaaaaaacatttcataaaaatctccaagtctaaaaaacagtatacagtctttatatctattttttacttcaagatactgtttcatcataggagttaatttattcatatctatttgcattatcaaacctccttcttttctaattaaatattatatcatagtagatgattattattaacacaatatataaaattttgacatataactaaaaacaatccaaaatgtatactcacattttggattgctaagtttaatgcttattaaataaaaatatatatatttttacaataaagatattatttcttttttaagtttaatgatattttcaaggttatcttcatttaactttctactatctataacaaattctttctttactattgatggtttttttgaaataacataaattctgtttgatagcattatagcttcgtcaatatcatgagttataagaagtattgttgaatttacttttttcttaacatctaaaagccatttttgcatggatgttttagttaatgaatcaagtgccccaaaaggctcatctaaaagcattatgtcattagaatttataaaagttctcaagaagttagctctctgtctcattcctccagaaagttctgaaggatatttatcttcatatccgcttaatccaaacacctcaaaataaggttttaccattgacctagctttactctttttttctttttttaaaattagtggtagtgacacattatctattatagttttatatggcaagagtaaatctttttgatacatataactatatttaccatttatattcactttgccactatcataatctgtaagtttagttataatattaaaaatagtactttttccacatccacttggccctaatatagaaacaaactcaccttcataaacatcaatacttatatcttttaaaacttcaatatctttataagtttttgatacattttctatagatacttttacttttttattgtggtaaaaattcatttgtgtaagcatcacttgccttcatatccttatctattaatttatattcttttaagaatgatgtatagttgttccatacactatctttcatttctccccatcgtggtgcatcatctttgtacttgcttgctaaatattcttgactctttaaagctagtttttcatctacttcaggtgcatgttttactaaaatttttgctgattcttctggattttttattgcatattcataaccttttgttgtagcttttaagaattttttagcaagctctggattatctttaagcacagtttcattagaaattataagtggtgtataataatccaatctctcatctaaatcttttactggtataaagtttaagtcatatccaattaaatcagctttaactgcatcccaaccttcaaatatccatgcaaaatctacagttttcatagctgcaaagaaatcatcttgaccagtattaactatctttaacttattaaaatcagctccatttttcttcataactgctttaaaaacagcttcttctgatggagagccccaaccaccataagtttttccttcaaaatctttagctgttgttatattcttttcttttggtgatgcaaacccagaagtattatgttgtataacagttgctacagcttttattggaagtggatcttcactagtctttgcataagtaacttgttcttgatagcttataccaaagtcagcttttcctgttgctactaaagtttctgctccactttcaggtggttgtactatttcaacatccaaaccttcttctttatagtaacccttatcaagtgctacaaataatccagtatgatttgtatttggtgtccaatcaagcaccatagttacttttttagaagaagtatctttatcattgtttttgtctttattgttatttgaagaacatccagttattgttgccaatgtaaaaacacttactaaacctaatattcctaactttttaaaattcataattgcctccctcaaatacctttaatcaattaatctatgtcttataacaactttttttacagcctgtacaattcctacaaacattaaactaaatataactactaatatagtagatgcaaatactttatcaagtgcatatgcactttttgacctaagcatataaacaccaagtcctttcgttccacctagccattctgcaacagttgctgccattacagcatacgttgcagatattttaagtccagaaaaaaatttatccattgccataggaaatttaaggtgaatgaatgtattaactttatttgagtccatagtcttaaataaatttaaataatctttatcaatattctcaatgccatctacaaaacttattaatataggaaaaaaacaagtaagcattaccatcaatacttttggcattgttccaaatccaaaccatatcataaaaagtggtgctataattattgtaggtatcatctgtgtaaccaacataataggataaagacatttttttattattgatacaaaatccatcaatattccaattaccaatgatattataattgcgactataaaaccaagtattgcttctcctatagtaaccacagcatgcatggataaattttgataatctttaaaaaacacattaattatatctactggtgtgggtagtatatactgaggaacttctaaaactcctaccatagattgccaaagaataagtataaacaaaaatgttgctattggatatatactatctttgactttatctatgatttctaagtttttcatctatagtcagacctccagctttttcatctactctagctactgttatgactctttcacatccaagattaaaagggattttatgtaccttttttaataattcaaaaacttcatcaaaatcaccttcaacagtagtgctcattgctcctatttcacatttaagaccacttttttcaatttcagcaatacaagcatctactactttatacatttcttcttcacctttgtaaggtcttagtggcattactgctatgtctgcgattaccatttaaatcactcctttaaaaataattaatacctactaggtatattttgttttttattaaaaaattttattactaaaaagatattatatttaaataaaagaaaagtcttatccaaaataggataagacttatttttatcttaactggtctccctacactggcattatccaaacaggttcaaagggtcgagataaaatctcctctcagcacattagctccccgaaatatattatatcttttctacttgattatactacacttatcatattttaacaaattttttatttatattagatattttatccgttcaaaaatatctaatatacattgtacattattacaccaaataaattatcttaaaatggtaatttatcaacatcttccaaaactagattaactgaattttctagtttttattttgctatttcaagcatatttggatgtatatcaattccatacaaatattgttctaaatttctgttttcactaatctaatttgcaatcgttacagattacagattagaaatagcttttagactctacttatctttatctacaaaaaatccttcaataaattcagtaataatattcagtaatctaaaaataaacctctatctggatttttaagatacaagccttttaggaagtatcttttgtgataatataaaaattactcgtcattatcatcaaaatcctcagcaaccaacattttagataagaatcaaactctataatataattattttatccaatttatttttgagaaataaaatatttttttaatttttaaattttttaatatgcaccttgaaaaaagaaacgttttcctatattatggtaatagtagaataaaactaaataggcaaaactagagaaatttagtgacgcaaagctatagggactaagacttatgaaatgagttatgtcagccagttgccaaagagatattttctttttgtttttatgaatgttttttagggggatatatgatatatgtttatggataaaatggatagatgtacacatatactaactgcatatatatgcagttcacgcgattactgcaattttatagatacacaattaaatgattttatactagaatatggagagaatgtggtagaatcttgtttgcatcaagtgatggtattggtaagcagatataattaaagaaattttattttctagaaaaccctttttagttttatctacgttttataattcattaaagaactaatcaaaataagcttcattatatatttttcatgaagtaaacagttgagtttatctcatatactgtttaccccaattacataattctaataatatagattccaatgatttaccacgtttagtagacaaatattcaacttttggaggaatagtcggataagaaattctcttaataagtccatctctttcaagatactttaattcttgtgacagtatcttatgacttatatgaacaacatctttttttaattgactgtaacgtattggctcttgttttaaaatatgccataaaataattgccctccatttacttcctatcacagtcatggtaaaaccaattgaacaattaaaatctttttgtctttcttcaatatttggaaattcttcaaaattattatctatatccatctcaatcctctctttcaaaatagtaagtatctaactaaaaagtgcattcttgtttagcgtactaattcgtaatataatcttgattaaaaaatagctacgcacactcgtgactttagtcatgagttagtagctaaaatagtcaacatatagggaaacctatatgtagagataggatagaacctatccaatactacttgaattgctaaaaacccctaaagctaaccaaactaaaacataaggatgaaataaacctaagtgtgaaagttacgaaagtagaaaaaattggttagatggtataaggttaaaccctaagtactttaaaatgggtaatcagcaggtaaactccgaataggagaaacttcaacgactattcctcttgagggaagtacactacaagttatcggtagtggaagtgggtagaccttaacggataatgccgaaggataagatatagtctgtgcttatgtgaaagtgtaagaagttcataagagaactgcataggtagtagcgaacttatgtgaacgacagcctcaaaaatgataaaagttaagacttacggttcttatatatgttatttaaaattaaatataaaaccttctaaataattgttttaaataattacatttgttaatattatgataggtgattaataaattgttcaccacagtattatataatatattaaatattaaaatcattaaaaagtgtatcaaaaaacaattaaagtgaggtgatagcagtgaaaaaagcttataagtttagaatatatccaaataaaaaacaacaagagttaattaacaaaacttttggatgttgtagatttgtatataataaatatcttgctaaaagaatagatgtttataaaaacgataaagaaacttttacttataaacagtgtagttctgatttgaccaatttaaaaaaagaattaaattggcttaaagaacctgataaattttcactacaaaacgccttaaaagatttagaaaacgcatataataaattctttaaagaaaaagcaggatttcctaaatttaaatcaaagaaaactaatagattttcatataaaactaactttacaaatggaaatatcgtgtattgtggtcaacatataaaactacctaaacttggtatggttaagataagggataaacaagtacctaaagggagaatacttaatgctactatatctaaagaaccaagtggtagatattatgtatcattatgctgtactgatgtagatattgaagtatttgaaaatactaataatcagataggtttagatttaggaattaaagaattttgtatctcaagttgtggagactttatagaaaatcctaagtatcttaagaagtcattaaacaaacttgctaaattacaaagcgaattatcgagaaaaacaatcggtagtttaaatagaaacaaagcaagattaaaagttgcaagacttcaagaacatatagctaatcaaagaaaggattttctacaaaaactatctactaaattaataaaagagaatgatattatttgcatagaagatttacaagtaaagaatatgattaaaaatcataaactatctcgctcaatttcagatgtatcatggtcagaatttattcgtcaattagagtacaaggctaattggtatggtagaaaaattgtaaaggtaggtaaattctttgcaagttcacaaatatgcaataaatgtgggtataaaaacgaggaagtgaaggacttaagtataagagaatggatttgtcctagttgtaatgaaactcacgatagagatataaatgcaagtataaatatattaaaagaaggattaagactaataacaattcaaaataaataacgtatgtaagaaccgtaggaactacggggatagcctgtggagaattagtaagacatattttagtatgcaaaattctatgaagcaggaaccctgtgactttagtcatgggaggttcagtgtagcatagagccttacataatactacttttttagatgtatatttttaaattttaatatagacatatgttattttattaattttatttaaacagataataataaataataatttatctcaagttttctatgtagataaactaatctaatgtttagaaaggattatataatatgaataaaaaatttcgtctttatcaagttgactcatttacaaaagaaagattcacaggtaatccagctggtgtaattacaaatgctgatggcttatctgaatcacaaatgcaaaaaataacaagagaattaaataattcataaactgcttttattttcaataaattggctaaaaatcatcaagaaaattatgatgtacatatcagattttttacaccaactaatgaagttcctatatgtggtcatgctactattgctgcccattatgttagagcagtagaaaaccaattcaataacaaaacagtatttcaaaaaactggtgctggaatattaccagttgatattataaaaaaagataatgattatgaaataattatgacacaaggaaaaattgaagtatctccaccattacaacaaacctatcaaaaaagattacttaatgcatttggtattttaaatgaagatattcgtacagattgtcctattgccatatcatctacaggacattcaaaagttatgattggaataaaggaattatcaacattaaatagtttatctccaaatttatatgaattatcgaaaataagtcaagaaataaaatgtaatggatattatatttttacattacataataaagaaactctacaagttcatggaagaatgtttgctcctgcaattggtatttcagaagaccctgttacaggaaatgctaatggacctttaggtgcgtaccttgtacattataaagtaatacctatacccaacacagagtttatatttgaagcagttcaaggagaagcaataaaacgcaaaggcaagatgttagtaaaagtaattatttcagataataagccagttgaagtaaaaataattggaaaagctgtaattgcattctcaacaaacatagaaatcgaattatagattctttctaagtaaatttttgaactttttaatactaatttaataacaaactaatttatatacaatcaaattaatttttttattatttgttaatatatatttatcattatattatataataatatagatagttactatatcttataattagataaatcataattatatattattgttaaaactcaattatataatttttaataatattattttaggaggtaaaaatgataaacgatattaaaaataaattcaaaaattacaaaccatatataaatggatacaagaatatgaagagagcatctgttttaattccaataatagaaataaataacacacactatatattatttgaagttcgctcaaaaaatttgaagcatcaacctagcgaaatttcttttccaggtggtaaaatagaatcaggtgagactccatatgaagctgttattagagaaacttgtgaggaacttggaacttttagtgacaatatagaagtaatatcaagtcttgacctccttataacaccagtaaagtttatcatacatccatacttaggatatataaaaaatattaataatttaaatataaacaaggatgaagttgaccatacttttttggttcctataaaatatcttttagagaatcctccaaatacttatagtaatactgtaaaagtttttccagatgaaaatctaccatatggttcaattccaaaccaaaaagattataaatttgaaagtggaagttatcctattctgttttataaatataaagattatgtaatttggggaatgacagcaaaaatactagaaaactttttaaattttttatcagaataacactcataataaatcatcaaaacttttacataagaaatttataaaagtttctaaatttaacaattctaaaatatcaataactatattttgtagcacttttttattttattattgtttgaatatttgatggttttcaatgcaatttcaacataaatactatgtattagtgtatactgttgatgaattaaagtatgataatctatttaataaagtatgaagtaaatgattttaatgtgtctttatggtaaaattactaataagtaataaaattaattaaaatatatggaggtgcttataatgtttgctgtaggatttgttgttataattgcacttgcctttttcattttaagtgtactattatttaatggaaaagccagtatgctactagcaggttataactctatgagtaagaaagaaaaagcacgatacgataaaaaaaaattatgtagaagttctagcattgttacttttattgtctctataatgctatttattatggcatttttgggatatagaatagagagtggtcaaatggacgaaaaaaaaatggttcccttttctataatatttataatagtcatactttccagtgtattttttaatatcctctactctaacaaaaaatgtaaaaaataaatagttgtaagttgagcagttaattataaaagattgactgctttttcatgtatattgactactcttattaaatattttaacatttaaaaatctatgtaaaaataatgaatatagtacaaacttctaataatgattttacctttgtggttacagtccactatatataatttaatatgataacatggaattactaatgacaactaagtaagcttttataaaatataataaaacaaaaatagatgtacaatgaaattatatcttatatcaaatttatttttattaatagcaaaaacttacattagcataacatatgacaaattcgcttaaaataaaaatttttaatataatttgttctatagtacatctatttcgattagtttacataattttattattttgtacaatattaattatttactaatatcccatttaatgaaaaagttctaggttcagtaattttgaccataactaatttaccaattaaatcatcatttccaccttcgaaatttacgagtttattttgtctagttctaccagcaaacttattttcattatttttacttcttccttcaactagaacttcaactattctatctttatatccatcatttatttctgcagaaatcctatttacagcttctaacaccctattaaatctatcatgctttatatcttctggtatttgattttccattttagcagcaggagttccctgtcttttagaataaataaatgtaaaagctgaatcatatctaactttttcaaccacatctaaagtgtccaataaatcttcttctgtttctcctgggaaaccaatcattaagtctgtagaaaaagcaatacctggaacttcctttttagctttttctattatttctaaataatattcctttgtataatgtctattcatttttttcaaaaggctactgcttccacattgtattggtagatgtaaaaactcacacaccttatcacaatctctaattgcgtatattacttcatcagatatatcttttggatgagatgtcataaatcgaaccctttcaattccttctatatcattcacttttcttaaaagttctgagaatgaaactggattttcaagtgtcttaccataagaatctacattttgtccaagtaaagtgatttctttcgttccatttgcaacaagctcttttatctcgttaattatatcttcaggagttctacttctttctcttcctcttgtgtatgggactatacaatatgtgcagaaattattgcatccatacattatatttacaaatgcttttaattcaaattttctattacttctaagaccttctattacttctccatccacatcccatacatccactaacattttgtcagaatttattgattctgtaagtaattgcggaaatttatatagattatgtgttccaaatataaggtctacatgtttatatttttttcttaattcctctacaacatgtggttgttgcatcatacatccacatacagctattttcatatctggattttttccttttagatgttttaattgtcctaagttaccatacacttttagctctgcattttctctaactgcacaggtgttatatattattaaatcactttcttcaaccatcattgacatttggtatcccatctcttctaacatcgaacataatttttctgaatcatgttcattcatttgacacccaaaggtttgagtaaacacgagttttctctttccagttctgttgaagtattcttcattttgtctgtgtatttgttctatatatttatcttgttcttgtattttctctataggtattgttacttgttttcttttgctcacgtctattcctcctagttaatttcttatattacacataaccttaattatatcaaataagaaaaatcttttaaagatattattatttttctagttgtgttttaatagtaaatctaatgatttatatatactatatttctaaaatataaaatcatataattattataataataaaaagatgttttaaattaaaacttaaaacatctttccttaaataaaatatatgatttactattaaatacaattacatctattcattttcaattaaataacaatcatttaatattaaatattgaccttcctcaaccgttatatatcttcttcctgaaaaagtatcattagtaactattccctctgcattacctaagctatcatttctaacttcataatatgcatcagaagaatttgacattataatatattctccagcaggaatttctaatccaattttatacataccatttccaaacttaccattcttggccttctgggctttagcatactttgctaatgtcattgttgaatcctcaattttaatatattgaccattctttaaggtgatatatctagtcccactaaaaatatcatttgaaagtatactatcagcattacctgtactatcacttgtaacttcataataagaagcataacttcctgagtttgaagtaattaagtattcacctgctgatatatcttttccaaccttatacattccatcttttatagtctttgtagtaggtttaacattttttacaaccccagtattaatatctccaattccatttgttatatttaaacactgttgtactatatttgaatctatatatcctatagaagttatcttcttagcattttttaaaatgcttttattgctaccatcattaactaaaactattggaccatgttttgataaagaagatcctacaagtgcatttgttaattcataagctccagctatataaaactctctagcatccttataaaacttatttattattgctttattagtttcaaaacgagtactccctcctagtctagtagatttagtattgtttactaaagtggtactcattgaagctgttcctcctattacataagactttaaaccactagttgaaaaaggtatactttgtccattagtaagaattattggtgctttatctcttgctgctacagatgcaatacttatagcatctgcttctcctttatatgcattggttagcataacagtattgactttttttattgaatttatttcttttgcaacattataacttgtttttattctgtcatttcccttaattcttacaactttcattttcttagattttaatgaattttcgacagatgtactaatagaatatgttcctccaattatataaacttttgatacattttttaatcttgcagatgtctcagttggtatagtatttttttcagttaatagtataggggcatttaaagctcctgctagtccacttgcacttaatccatctgcaatagagttactagtattaattaatatagcagttttatatgcatttttatctgctattttgcctgctatttcatacttattttttccttgtattttttctacagatgatattgcatctactaattgaatatttgcaaatacaaaagaaatacttaaagtcaatgttaatattcttttatagaatttcataataaaattgtccccctcataataaatttttaatatataaatacatattcttaaattagttatgtacttaacaaacttatgtaaaattgcaaattatattaagcatattacaaataaatattaatacaattattcatttagctataattgtatttacatttatattaaaaatcaactagatttgtataaatacttataattatatttttattcttaatattttttttattatgttattttaatagatttatttttcttttttaagcatagagatgtatttttccatatattctatttctattatagtttcgcttatttaattcacccaaaatttcacttaatattagaattttaaatcttttactaaaacagacttttatagttctattaaaattttttactaaactttattttatactatgaattatctattttttttgctaaatttaagcaagttttccacaaaaaatatatacattactatatttttaaaactctataaatatataattgatttaattggaaattttagtgtattcaaaaaatgagaaatcagaggagattaatataaaaatttatcttgaaaagtcaattaaatatatcttatatttaataactacaaatgagatacatataagaatattatataggtatgataatttatctgttaaattaagtgtaattggtactatataaatattttattaaaaataaatatataataccaaatctttaaacaacataagaataaaatagttataatctactttattcttatgttatttagttattataatgctttataaagtaaaatattatttcgtagttaagcttgataactaactcttcttattgatagactaacaatcttgaataaaaatattcctgcaactagatttattaaaacagctggtaatactactgctaagaataaagctgtaaatgaagctcctggaagaccaactatagcttgagctgctaataaaaagatagttccacttacaagagttcctattggcattattattgcaactactacagtatcttgtgttttcttagctaatttttttataaaaggcatattataactaatattcattaataaaaatactatatttgctgtaagagttttatctattacattaggaatttgacctcccggaaaacttgatgtaagtgctgtaaatattcctgttactatacccgctatcaaacaagttttataatcatctctatttaaaaccaatattacaaataacattgctagtggtacatctggcttcattggtaatcctatagctggtgtgatttgatgtattaataatcccatcgctaaaagtattgcatttaaagttaatttttttgtatttgttttcattttttgtacttcctcctatttttttaattttcaatttatttttttgccaacctactatatcatcatctttagcttttgaaattcataacatctttctcaccaccttctatcttttaaattttcagtaaaataaaaaactccgtcctaaactaataggacggagattatccgcgttgccacctaaattatataaaaattaatataaaattcaattttcatacatctcattatcaggtacttacataccttattcgctataacgtgcgactgacgataaagtctactctcaaaactatgatttcaatttattcctctaagggccattcatcaaattttttcttgctaagattccaccatcctcagctctctatactgaacctaaatttaactactcttccttgtcataggatttaatttattgtattgaattttgttgttaaaataatgatattcttttttctaaaaaatgtcaatacctttttataaaaaatatattttgtaatctattttttataaaaaaagtaaattatactatacatttcttttcatatacaaaattctatgaataattactttaatggtctaatagtctgctctttggctctaattcttcttatattaattttgtgaataactgttgatgtaattttatattttgattcatgaggaattaaattcttcaaagttaattaagtacatttatcaataaatttacttaattaaccatcatttaatactcattcctgtatttatatgcctcctttgaaacagaatattactccattttaattacatcatattattaaatagataccaatgattagaaaaatgatattcttttaattatttttagtaaaattttttcttctttcttttaataaatattagcactactaaaactataaccaaaaatatgactattatggacaatactaattttgttaggatattatgtcttcttgcatttcgtcttttatatttatttatagtttgatatccatactttttagttcttatacttcgttttttcaactttactttacttttattatatttcctacttttatgtctacttttagatttaatagttttaaatttagtattatcatatgtataattctcttttattgaagaaatgtatacactagactcaataatagcttctgcttctacttgtaatggatttataatactgattataagtagaaaagatatagctatcccaatcaattttttcttcttattcatattttccccctcataaaaatttttaactagttcattataatatatatataactaaaaattacaaattttttcaagtttcttatatatcttattatctttaatattatttttattatcataacttttactttttttaaaatttttcaaagtagtattaatttatgatacttggtgtataaagtataagttaaatctactttcaattaaatttaccatttataattactttataataaaaataaattagttaatttattctctttagttctgttataatgtttctacaaaaaagaatcccattaatgggattcttttttgtgatttattaacatatttaaagctcactagtatcgtattataaacttaaatgctcttctatgtattgattatatacatatccagaatatcgtttttcatttttattgatattaactcttgcccattttccaacgctataacatacttcaactttaaaaccatcagggattgtagttataactttagattctaatgttctatcatttctaagttctaaacttaatccatttgttcttatatttcctatgtaattcttttttctattttttattgtatcattactattgtttttagcattacttaatctttctaaatatttataaagtaaccagcctttgtcataattactctcaacttctgcccatattccatctacacattttaacttaacaattttaccttctggtatactttttaatttcaaactatttatgtctggtttttctcttaaattcaatttaattttagttttaaaattgatgctagatttgccaaaattttttaacattaattcagatatcatcttaagccctcctcttgccaaatattaagttattaaaatatataactctaaaaatacttttaacaaaaagaattattatctttttggcaactggctgacatgacctttattacataaagattttagtccctatagttttgcgtcattagatttatctaatattgcctatatctgaataataacataatttgaacaattaaaaaataatattacctcaaattttatattatttaaatataaattaaatttttaattaataataatcaaaaaatatctttatatttattcaattactgttctttatagtcaatataaaagacagtaatttatctatagtgttacttatattttatatatatggctatttttcaacattttacaatatatataacatttatttttttaacttttgtcagtaaaatgtcagcaagacactttatccacaatttttatataagttttccacaacttatccccagtattatccacataaaaaaggtagctcttatattattagctaccttttatttattaatcttcatatttccagctttttatccaacttcctatttctattattttttcttcagttatttcttctccatcatgtaattttgaaattaattctgataaaggattgttatgtaaacctctaaaaactctttttccctctattttgagatattctctctcttttattaatactgtatagtgtacatgcctcccaattctctatgatattaaaaaaccttttttggttaatctagctaaaagtataattgtagttgtatgcttccaaccatatgttttttctatttcatctgcaacatcttttgatattacagttttataaccagtattccatatgcatttcataatttttaattctgtatctggtaattttttatttagcataatatattccttctttcaatttatgtcacttcttcaaatttatctagcttaaattataataggagttttttagaacaaaaactatagttaatttttaccaggtactctacgtgtttagtctgttttttaagtgtaaaataatgttcatatctataaatttatttaactttcaaacaatcctgttgaataataactaattctattgtattattttagttgtagaataaaactaaatcggcaaaactagagaaatttagtgacgcaaagctatagggactaagacttatataaatatcttatgagttatgtcagccagttgccaaagagatagtgttctttttgtttttatgaaagttttttagggggataataatttatatgtttggaaataaaatggataaatgtacacatgtattgactgcttatattagcggttcgtatgattattgtaattttttagatacacaattagatgattttatattagagtacggagaaagtgtagtagagtcttgtttgcaccaagtgatggtattggtaagtaagtataattagatagacattgatttctagagaaccctttttagttttatctacatttatattaatatatagcaatgtaaaacgcttaaatatatttttaatattaagaataactaaaatgttgactaaaaaatataattaagtagacatttctattaatctatgatacaatagtatttgtggtaatacacaattaaatcaagtatatcttgatataggttaataggagtatttttaatgaataatggaatagtgaaatggtttaataatgaaaaaggattcggttttatatcaatggaaggtagagatgatgtgtttgctcatttctcagctatacaaacttcaggatttaaatcattagaagaaggtcaacaagtaagctttgatatagttaaaggtgctagaggtcctcaagcagaaaatataactatattataatatatagatttttcgggaaagactctttttagagtctttttttattgttagtatatgtaagataatcattggtgaagtaaataaggtatattgagtaatgttcttgatagtttatatgctaatgaatttcaaaaaaataagcactcctataaaaagagtgctcttaatgtaaatataagccttcattggtccagcctaataccccgtattctccaagttctaactcttttttatatacattaccactttcagccatatctaacacaatcatttcttctttagaatcaatttgtaaaatatgaggactgtgtgttgtgacaattatttgtgtttttaggagaattgcttttaatgtaataaaaagtttacatacaacatagttaatataaaacaaaattatttttgagaatgagctaaataaaatcttaactttacataccacatagttgatataaaaccccaaaataaacttagcatctccaatgtttacacatatacaatgctcttaaaattgcagtgaacatgcaatagtgcaattgataatacttatcatatattctcaataccttatatttcaactgctaaacctcaatttgtcacaaatatcgctcactgcaaaatttctatatttttattatatcatagcatataattaatattttcaattaatttttacatttaattatgtttaaattctataataatgcaactttaatgtttctttctggaactaatataaaaactatttcagaaagattaggtcatgcagatataaaaataactatgaatagctactctcagtttttagaagagatggacagagaagcatttgaaaatttgagcaaaatactatttattgtattttaaagaagatgacttattcaatatttgatgctagaatataattaataaaaatttaattataggtgattgtattatgaacattattaaaagcataactttactcttaacattattaattgtgatattaatgacaggatgttccccaagagaaagtgctagtgaagttgcaaaaaaatatattgataagatgaactctggtgactatgaaacagcatatagtttattaagtaaagatagtaaaaaaaaaattagtatagaaaatcttgaagaatttcaaaatattttagttagtacaaaaagaataattagttataaaataggtaaagaaaaaatcataaaaaaatataaacatgatggaaaagaatataaaaatgttgttaaattagaagaaacttttaatataaaaaaccttctttataaaaaagatgattctctaaaagtaaatagatattttgtagttgaaaataacaaatacaagctattattgtatgaaagtttcaaaaaagaatttggtattaatagtatggaccttgctcaacttaagcttaatgattttggactaaaatactttaaagaagttgaccttatactaaaaaaagctattgctattaatcctactgattcaaagctttattatgcccaagcatgtaattatatgaattttgatggatttcctggttattcagatacaacatataatgctttagattcaattaataattctttaaagtatttagataaaaatgattctgactacaaaaaaaatgcaagtaatatatataacttaaaaggagttattcttatgtttcacaaaagatttgatgaagcacaacaatatttaaataaagccttatactttaacaaagataatgaagacccaaaatataatctaaatacaataaaaaaacatctaaactagatatttaatttttgaatttataaaatatttttttatgtataattcagcactgaatcataatctctactaaactaattacaagtttaaattataaagacttatttctatataaatattactctataacaataagtttcttatttaaattttaaaatattatctaaaaatcataaaaaagaaggtataaagagctaccctcaagctcaatataccttataaatatctaaacttcattttttactaatttttctatatctttgataatatgttctttagatttttttccagctatggcatcaaaaattgcaacagcctttttctctccaaacttttctgctacatcattaaagtctaaaaatctaacactttcttttggtttaccaaacatataacacctctcatacatttttatatatttattataacttctatagacttatttttcaccaataaacgttagacaaattagtccctttatttttttaaactagctttaccttcaaaattcttaacaaaaacagtttattctactctataaataaaaatagacaatttaatttgtaggaaactgataatagaatacagtaaataaaactttgtttaatctatctgaaaaagttatctattaaaactgctatgaatttataaagaatattctagttcataaaaatacaaatatgtaaatataatcaccttaatattcaatttatttaaaataaaaaatgtataaaagatttaataatgacaatatactattctcaatacaatctatgatgtaaataatttaaaactactatattatttaaaaatttatatttatatatgcaattctaaaaacttaataagaagtgaacttagaaaataaagcttaatttcaaagacttaaatagaatattattattagtctaaataaactacgtgtatcaaaattatatattaaattcttctaaaatttttattgcaaatcttgcgtttggatatgtaatagacccgccaccaattacacctatttttatagcttctataatttcatctttacttgctccagaattaatacaaccctcaatatgataacaaatacactcatcacatcggcttaaaattgaaatagctagtcccattaattccttattttttttacttatagccccttctgaataagtcttatcatcaagacttccaaatactctaaaaaactcatctgtttcacttaattttttattgtaaaatcccctatattctttcatttctctagtattcatcttctacctcctatgtttttcttataagagtatcacactgtacttatattttcaatattaaatacaaattttcattttatgttcattagcctaatttatattattttttgaaatctcaataagttatcatataagtaagattttttcagaactaaaatagaaatcttagtaatttctttattatctatctcagttctgaaatatattattcttatccaaacattattatagtgattaattatattagttatttttacctgaaattttatacatcaaataagaatatataaatggtagtattacaattacaaagattacaaagatattataaaaaggaatattaataaatgcattaataattaataatattccaccaataagccaaatccatccagctaaatggtgtgtcttattccaattatcttcatcatcaagagtccatggcaaaattattcctactgagtaattttgtttacatttaggaagatagtttccaaataaaataactattattcctaaaattaatcctgtataaaaattagactccaaactaactcctgttgaatataaaaccatcagtatttgtagaattactgaaagtatagcaactccccattttgataaattttgtataacatttgaaaaattagcttttttaggctcattctcaagtctaaaccatgtatacaaatggatacatagcattaacaatggtacaccaaaagctgctataacctttggagcataattatctggatttccataattatcaaaatgaattgcaacttcatttggtaatctattataaaaatatattgatacaataaatggtataaaacatattaaagtagataaaataaattgtttatttatcgcttttttcattatctttttctcccttctccataaattgtgaaaaccaaagcataacctcttcgaaaactgaaatatttatttcgtagaaaataaagttcttatactttgtttcaaatatgagtcctgccttttttagttgagatagatgataagaaattgtagcattcgtcatattaaatttttcactaatttctcctgctgacattttattctccctcaacataaccaatatttctcttcttatagggtctgaaagagctttgaatgtttctggaaaccccaacaccatcacctcgctatttagaatttcatctaaatagaatataacataacatccattttatttcaataactatttagaaaaatttctaaatagttatttccaaatatttattgaaaattttcatattaagattctcaatttacttaagtcgcttttatataatcttattttatctaatttttttaatttaacaaaagtgtattgcaccacaattgttaaagcaaaaacctaatgactgatatacttatatatattacatatacttttaatttcaaattaaaagtagctaaatccaatttaaaaagtagttaagtcctatttaaatagaaaagaatgaaataagaaatatactgtataaaaatgcataaaaacctctactaattagatacaactataatagaatatatttattattataataacaaaagaattaaaaaaattaatttagcataaccttgttaaatatagatttgaatatgaatttaaagttatgtaaaattaaaaatacaggaatgaaaattccattcctgtataaaatctaacttttgagtctcaatacaatcttattttgagacaatcttttttgttttatattttcttatatttaaaatataacgcatatcttatgcaacatattcatatttttctttatattctttcatcgcatcattccaagcgtcttgtactgttacacctcttttattagcaattttttgtgccagttcaattatcttcatagctcttcttgatatgttcataaacattcctcctacaaattaccatatatttcatatatataaatcaaggttatatttttatgatatataatccttctattgtaatattacaatttatatgtgtattatatatgaactatattagaagataattagaatttttataaagctatatgattagattaaatataaaagctttacaattacttataaatttaaaaagtctataaactaaactaatgtttgatataccaattttacgaccataaataatgccattactaaaaatattggttttatcatctttgaacctttctttatagcaactttagcacctacataagctcccattatcatcactaatgcaaacactatagcaattttataatctacttgaccatttatcatgaataataacaatgaagttatattacttgttaagtttaatatttttgtatttgcagaagcatgtaaaaaatcatatccatatatttttataaatccaaaagtcaaaaaagttcctgtacctggaccaaaaaaaccatcataaaaacccattataagagccataagcatccctagtcttaaatttttcttattaacagcttcaaaattatcttcttgacctaaatttttagaaataaaggtgtaaatagccactattaaaatcataaccacaaccaaaacatttaatatctcttcacttattgataatacacatctcacacctagaacactaccaataatagtaaatggtactaatttttttaaaagatcgttattaatttttccagactttgcatatctataggcactacttatacatcctgctgatgctgcaaatttatttgtaccaatggcaagatgtactggcactccaattgccataagaacaggcatgcttataagtccctcctcctcctgctatagaatctacaaaagcagctaaaaacccccctatacataaaaaaataactgaaaacataaaattcctccatcattctctttcaatttttcttacaatatatattatataatcttatttaatacttattatccagcatattctttctatattcatttggagttatactattaaacttcttaaatatttgtgaaaaataactactgttattaaaacctactttcttacaaatatcactaatactcatgcttctatctaacagatattttttagattcttctatcctaagaagatttatatactcagttattgaaactttatttctttcattaaaaatagaactcaaataatttggacttataaaaaaaacatctgatatactattcaaatttatattttctttataatatttttttatatattcgtttatattttcaattagatttcctttatcttttctccaaaatgctctattcttatcaatacactctttggaaaattcaaataatacattccataaatcttcatcactgtctacaagtgatatttttttattatatttatttcttaaataagatataagttttaaatcctctaaatctctaagcactgttctagacaatacaaatatcatttcctgaatagtatctctaacatcattatatcttaatttgtttgtatctattagattataaacaccttctaaattcatatttttaatttctttttcaatataaagttctaattcaaagggatattcttttgaagaattattgaacatatctatcggattaataatatactcttcttctaataatctactatttgcttttttaagtgcctcttcaagtcttatattttcttttctactctttaatatctcctcatcttttatactaagttgattttcaaaaaaattcctcttagctatttcctgaataaattcagacatcattaataaattttcttttaatacatataatctacttttaggatttaatggaaattcattgtaaattttgtttatgtattttatatcaataccagaactacttgataattcagataaatttttatctatatcaatagacttatatactataaaattaccacattctatatatccaactatattttcttctaatactataggtatctctaaactggaaacaccatactcacaatggtacactttttcaaagttatcattatttatgcttttaacaagttttttagtacacggttttatatttttacaaatatcgcaaaatttattttctttcttagtctcaaatattcctttatactttaagtcatatacagatattctaagcttcaatatattagatatttgatttgcaagattttcaattatgtttacattaactaactcttgtatattgttttcagaaaatactataggtatttgtctcaaactcgaaaatttatgaggaacataagtaattaatattactaaatcaattttaccagtgtttataatttcatgttctgaatatggtgggcaataaactatagatgtttcctttatattgacctttttaccatcaatcatttgtattccttctccctgaatcacatataaaagctgttcttcacttaaatgaaaatgcttttcttggcagtttcccggaaaaaatcttacaattccagcactaagtctattgaattgtgtttttgatggttcgtgtatccacataacctctccccaatcaaatttttgtacttcattatttgactcaataaaatccaccataaactcacctcgtagtttttatctaaatatttttttattcctttaaatatctccttataatatacattatcataattttcttttttattgtatagataaatagttatatagaacattgtccaattcttcctaaaaatatagtgtaaaaaatctttcctcaaatgtttccaattgaatttactctttatattagaaaaatcaaaaaattatttctttattctataaggattattttttacacatctttttttcttttaagtaatatattttctcatctattttatccatacaactttctagttcatgtattttatttttaatgttttgcttatgttgttgaaataattggattcttttatctattgtaccatctcccatatcacaaaaatgaaagcattcatggatatctttaatagataaaccagtattttttaattctttgataaatattagacgctctacatcttcttcagagaaatagcgaacaccacttggttttctattgataggaagtaataaacctttttcttcataaaatcgaatagcagatgaagaaatttttgttatttttgatacatcagttatagaatatttcataatctctacctccctaaattttatatgaataagaatattataaaaataccttatacagtagtcaacaaaaaagtattgacttcaagttaggttgaagttgtactctttgaagtgtaaaagaaaacttacaaaagaaaggatgatataaatggaaaaatatgcaactatgattaaagaaaagctaaatgaaggaaaggtcttatgtggagtagctgtttcactgtctgattcagttgtaagtgagttaatcggtatatctggatatgattttatttggattgaaggagaacatagtgctttagaccgtaaagacattcagcaacatatgatagctgcccatgctggtggtgctgcttctttggtacgattagtaaacagtgaccctgaccttgttaagcccataatggatatgggaacagatattatttgtttcccatttattaatacagtagaagatgcacaaaaagccgtagcagcttgtacttatcctccaaacggtataagaggatataatcctcaaagagcctcttattatgggaatatgaattattttgactatgtcaaaaacgcaaacaatgaaacattaaaaatgatgttaattgaacagaaagcaggttatgataatcttgaagaaatagtaaaagtcgagggtattgatattatagcattaggccctggtgacttatctttagacatgggtttttccggatatatgaatagaattgaaataaaagatatgatttctcatgctgctgaaatatgcaaaaaatataagatgccctttattatttttcctacaatagaaaagaaaagtattgaagaatgggttaatattggagcaaatatgctttgttttgcacaagatactacctttatcacttatgttatcaatcaattattatctttttataatgagattgtaccaattcaaaaacaacattaaattataaatctaattttatattaaaagagactaatattttatctatctctattaaggatattttcttatgtatcataatattagtctctcttattattatatactgctatcatcattagttgctatttatactatttttataatatacaaatttattcagctaacgttttgcctaattctatacactcatcttttgcttcttcatttgggtcttccattgctgtaattccttctccaccaataattgtagcaccagcattttgcatacgttcttcccagtctctcatccattcacaatttccccatccatatgaaccaaataatccaatctgtttacctgataccatagattctaattctgaaacaaatggctccatatacccctcttctagttgctctgctcccatagatgggcaacctaatgcaaatttatcttcttcttttaaatcacttggtttcagtaagctcacatctaaaacttctggtgtcttaccttttaacttcacaccttcagccacaaaatttgccattttttcagtatttcctgttccactccaataaacaatatatattttactcatttttacctcctgtagtattttttaattaatcaatagttagttatagctaactaacatctaaaaaacaaaagatttctttatctgaaatctctttatttttctaaatatagaatatcacaattgattttgaaattcaatatttattgataatatttatcatttatattttatattcattttataatatcaaaacactgtatcgtatttctaatctttcatagaaaaatttctaacttatagtacttttgcatctcttataaatcttttatatgtataagtacatagaaaaacacaccttttccagatgtgctatctataatatcgtatatttatttttcaattctaactagctaatatgtttataaattttatcacttaatacctttatacattgatgtaaaatcttacacctaagtaatttttattatttgtctcgactctatataatatagctattttatcatcaaatcaaaaattatcttttgctattattcttgtatttataaagatttaaatataagtatccatttccttgttccgttctaggtattccaagcgctctcgtacattttattaattgtgcatacagttcagcttcatctaaatctctttcaaactcctctcttgcccattctttaattagtgctaatgagcctgatacgtatggtgcactcatactagtaccactcataatagcaagtttattatccatataagtcgatataatatttcttcctggagccaccaaatctattgtagtatttgaattactaaacttttcaaccaaatagttttcatttattgcacctacttctattacctcagcataactggctggataactatactcacttgtactagaatcaccatctccattattacctgctgcacacactacagaaatattattttttactgcttgcatgacagcattttttaaattcttatcatctttgtttcccccaagagacatagatataatatcaaccttgttatttacagcaaagttaatagcattaattatactttgatatgttccggtaccatctttatttaatgcttttgctattaataatttacaatctggagctactcccataacttcattattatagttagatgcagctataatacccgccacatgagttccatggccattaaaatcctcatatatatttttatttccattactgtcatcactaaaatttgcaccaccaattatttttccttttaaaagaggatgagatatatcacaacctgtatctattataccaactacaatatttttaccagtataaccttcatcccacattcccctagcattcatttgttttattccatatgggaatttattttttgcacctcttagattttcatttatttcatacggaattagtttcattcttttattcatcatatatcctcctaaaaattttattgcttataaaaatcatgaattttattttataataggtttataaatcaaattaaaacctatatctacttatttatatttatgatatattttttatttttaggagtcatatttttttgtatataaaataatatttagataactatattaaaaaatacatgtttgcttatatacaaaacttactaaaatatctttaatatttttgtatacaaacagtatatttttcatacaaaataaaaaggatacctcattagtgctataacacctaagatatccaattaatattttcttaattttttctaattttcgtaaatatagttcactattttaaaactgctcctgtatttgctgatgttaccaatttagcatatctacttaagtatccatgctttattttcggttctaaaggtttaaattttaattttctattttctatttcaacttcatctacttttaactctaattttttgtctggtatgtttatagaaattatatctccttcttcaactagtccgattaaaccaccttccatagcttctggagaaatatggcctatagatgctcctctagttgctcctgaaaaacgaccatcagtaagaagtgctacatgcttatcaagtcccattcctgcaactgctgatgtaggagatagcatttctttcattcctggaccaccctttggaccttcatatcttataactataacatcacctttgtttatttttttaccaaaaatagcatttacagcttcttcttctgaattaaaaactcttgctggtccttcatgaactaacatttcttctgcaactgctgacttttttacaacagctccatttagagcaagatttcctttcaatattgcaagcccaccttggttactatatggattctttaatgtatgtattacttcttcattttctatttcacaatttcttatattttcccctatagtcttgcctgttacggttttgcaatctaaatttattccatttatctttgaaagttcgttcattatagctggtattcctcctgccatatgtaaatcttcaatatgatgttttccacttggacttaattttgttaaacaaggagttttttcacttatttcatcaaaaaaatctaagttaaactctattcctgattcataagctattgcaggtaagtgaagtactgtatttgtagaaccagccattgccatatcaacagctatagcatttttaaaagcatctattgttaaaatatctctaggttttatgtcgttcttaagtaactccataacatacatacctgcatattttgctattctttttctttctccagaatgtgacgcagcagtaccattatatggtatacccatgcctaaagcttctgttaaacaattcatgctatttgctgtgaaaagtccagagcatgaaccacatccaggacaagagttcatggctaactcttctaattcttcttcacttactgttccatctttacatgctccaacaccctccattgcagagttaaaatcatatacttttccattttttttacctggaagcataggccctccactcacaacaatacttggtatattaagtcttgcagcagccattaacatacctggcactatcttgtcacaattaggtataagtaccaaagcatcaaaaccatgtgccatagccatagcttctattgaatctgctattaattctcttgaagccagggaataattcattccgacatgccccatagctataccatcacatacccctatagcaggaaattctaatggcaaaccaccactcattcttactccattttttgcagcttctgctatttcatcaagatgcagatgaccaggaatcacctcattttgtgcatttactatacctattaatggtctttcaatttcttctttagtaagacccattccatacattaacgctctctttggagctccttctattcctttttttatatcacttctcataatattacctctttcttacttttttaaattttcataatattattataatatatttttctattaattaattacgaaaattgtaaaaaaatattagcatatactaatgaaaatttattacgattttttatcaatatcttacacaatcgtattatataatattatcttttcaatatattttataaactaatatattttacaaattgttgagtaatattttatgatataaatcagaagaagcacttctataatagaaagtgctcaactatgaataagattaataatatatttgccttagatatatagacttttataaatattaaagattaatcaaatctgatgtttgaaactttatcccaattaatcttccttgaatagtcttctggatgtgataatctaactatatgagttgaattatcatagctgtaataaattgtagtagtaccatcaactggattctttttgtatccttgatatacagcactatttggtactttcttttcaacaaagctatatgcagatgaagtatcaatagtttctattttattaggaaatataaacatataaaaagctactactataaaaatacatatgcatgtaatactataccatttaatccatttcataaaattcctcctactttaccaaaatatactattattatttccatatatttataatatttatacatacgataaaatttttatatacctaactatataattgtagaaactttgattatatatattttttaatcttaataatatatttttataaattaataaatttttaagattttattaaaagatttttaaaacttacagtttaatataaagatagtacttataaaactaaaaacataaatttgaaaggggacaaaataaaatgatatggacattttattcatttatttgcgttatattaccatgcttaatataccaaatagtcgttataaaacgaaaaaatttgaaagttgaaaagaatgtaatgatacatttagtatgggtatatatttttttattatatatctatctagcacttagtaaagctggaattggtagcatatgggatataggaaggtatagtgggctttttagaattgatgaaataaatctaataccttttgactcagttggcatcttaacatatattttaaatataattatgtttatgcctttaggatttttactacctttaatttggaaaaattttagaaatattatcaatgtttcattaactggattaggtttttcattagcaattgaactttgtcaattgtttaacttaagagctacagatattgatgatttaatgatgaacacattaggtgctgttttaggatattttatatgggtaggtgtaaataatttatttaatcttataaagaaaaaagatattttcccatctatatataaaaatattattcaagatgaaattgctattacaattgatgatgacataagcaaaaaaattacctctctttacaaaaatgaagctattatatatttaatacttgctgttttaggagaatttttattgtttaattggtccattataccttattaaataatttattgataaaacaagtgtacttcgatatttacaaatatgtaaagccctctttcatactacaaaagaaagtgggctttagttattaaactaaaatgcacactcactatttagctggcatctgaaatattttattaacattgtatctgactttatttgatgttatataatcatattttgttccattttcaatgaagttttgtatattgtccaacacttgtatagctcttgtattattttcataatctcctatttttacagtatcaattttactttcaaatactgcataaacttgactaccatctattttaatttggtttatctgcattaaattagttttatcttgacttctaattattatcatatcaattcctccatttacttaattcattttaatttctaagaaataatattttataattgatttatagattatttaaatttttaaacttagtattttattttttaatacgattatttatataaattacatctctaataaaaaattctcttaaagaatacttttttgataatactttgttttatttgtagattgcatttttgaccattataactaaattaaataatctaatgtattaaagcataaaattatctatgctactgatttattttatacatttggtaattttacttgcaaaaaattttgtacatattgtttatatctcaattaagggttttcaaaactttctatatatttattaattaattcagtttcttatttcaacataccacctctcatcaaattaccatttgtataattcatattatacatatacaaatggtaattttcaatatattttattattttaaccctttttttttatatttttggtaattttattttactttttatcaaaataacttataatttcggtaaggagtgatgtacatatggaaagtttaggagatagaatagcaaatctacgaaaagaattagatataaatcaaaaagaacttgctactaaagtcggtataactgaggctagcttgtcacgttatgaaaataatttaagagaacctaaaagtgaaataatagttagattagcaaaagcattagaaacatcaacagattatttattaggcgtaaatgataatacaaaaataagcaaagaagataaattaatcatagagaacttatcagtaagtgaaaaaacaaaaaagctcttagaaaaaatatattctcttgaaaaagaagatagagaagctatagaaaaaatgattgataatgcctatttaaaaagattccttaaagaagagaattaattctcttctttttctttatacaaaatctcaagtaataattcataaaaagtaatatcttcactcaataaatgttctaatttcattcctatatcttcaattttttctttttttgtaacagtagtgtttgacttttccacatataccatcccccaacaaacttacgttcttaatgctagtcagaaattcccaacaaatttttaataaagtttatgtaattgtattttgattttataaaatatattttgattatccaaaatttccctagataattatcttaattatataataatacttttattctacagttgcaataaaaaactcgtaataataacaaaaaaatctattattgtagaatcttgtatgttttttctatttttatatatttttcaggatgatttttattataaaattttttataaatatataatttttttatatttatttgactttcttttaattctttaggatggatttaaattttctataaaaatcatactattttagctgtttacttgcttatttgatagttttatttctttgattaaatatctttcagaatctaagccagatgtctcaaaaaaactgatttataatataatcattttttctgctattcttatttttccaattttagtttcatattaaaatatacttttcatagacactacattctttcatactcattttcacatttaactatacaagtagtcttactcatttatgtactatactttattaatatttattaagaaaaactcaaagatttaaaaatatatattttctataaagtatatttatgaattatttcatatcttcttttaaaataacattactaacttctctatgttcatttctatacttagttggagatatattataattccttttaaataagcgactaaaataatttatgctatcaaagccacatctcatagcaatttctgtcatatttaaatctgtttcctttaaataatatatagctttatcaagcctgattccatttataaaatcgattgtagtcttacctgttatttgcttaaatgttctacaaaagtgatgtgcactcaagttcacacgactagcaagttcttttaatgtaattttatccatatatttttcttctatcaagtcaaagatacattcaaatttttctaaagaatactttctttttataaattcatcttcagaatatattttatcaatatgacttcttaataagagtactattaattgatagatattagcttttatagataactcatatccaacttctttattgtgatattcatcaagtatagttgtaatacattttaaaatcagaaaatcattttgaattaaattattaaatacaatatgatttaaagccaatggtgctaagtacttagtttgtaacaaatcaacttgattactaaaaaggaatgtgggctcaatacgaatactatagaattttaaattatctgataagctttctaaataatgtaattcattactgtttgctattacaatatttccaggcactaccttaaaattatccaatccacattcaagatatgctataccatcaataaaataatatatttgtagatgctcatgccaatgtcttttaaagtttgctccttttttaatgtcatcctttaaaaaaatatctataaagttttcttgacctttcctattaaaatatgtatttttatccttcattattcccccctcatcaaaatagtgctaattataagcaatatagttattgtattcattatttcatatcgctattatataaaatgtaactatcattgtaaacattaacataatgccagtcattataataaggaggtaataaaaatgacaaactcttttaaaaaagatgataatagaaaaaaaatcacagttttatttgtagtcattgccatgacttttatggcaacattagattcgagtattataaatgttgctctcccagttcttgcaagcaaactaaatgtatctctagcatctattgaatgggtaatagcaagttactcaattattatttgttcaacactattattttttggaagacttggagatattattggtaaatcaagagtattccaagtaggtactattctctttacatcagcttcattactatgtggattaagtaattctttaactttacttatagtttgccgctttattcaaggaataggcgcttctgcctacatggcaaacaatcatggaattatcacagaactatttccaaaagaaagcagaggaaaagccctagggattctagttactgcagttgctattggaaatatggttggaccatctgtgggaggatttattttgtcaatatttgattggaatgttatattttttataaatattccaatcggtcttattgtaatctttttaaatacaaaatttcttcctaatagtaaaaaatcttcagaaaatatggataaaactggtgctatacttcaatttttaggaacaacattattttttagtgctctaattagtgctcaacaaacaggattactaaatccatatatattaattgcactattattatcaattatttttattatattatttttgatattagaaaaaaaacatcctcaaccgcttcttgatcttgaaatttttagaaattttaaattttcattgaatttaatttgtgctcttacatcattcatttgtattgcatcatcaagtattttaattccattttacttacaaagtactatgaaacttccccctattcaagcaggtttatttatgatactatcacctttgattttagccattttttcacctatatttgggaatatatcagataaaatcaagtcagaaaaaattattttaattggtcttctcgttatgagttttggattctttctaatgtcaagattgaaagaaagttctgcccttattttatttgtaatttatatatcgataatatcaataggacaagctatatttcaacctgctaacaatgctttgataatgtcaagctgttctagaagtaagctaggagttgtaggaagcataaattcccttgtaagaaatttaggacaagttataggtattactatttctacaacacttttatataattttatgagtattaaagctggatatagggtcaatgattatgtgattaataatgataaaatatttgtatttggaatgagaaatgtttatattattgttacacttgtttgcttaataggtgcaatattaattggcttttatttatttaaatataataaaaatgaacagtagttttttataattatattcaaattatgattatattataagaaacttactaaaatacttcctttgagttaaatttaatttggacatattgacttaaaaatgttttattaatttgataaaatatttcttttcctatagtttataaataaaaatcagctgagcaaaatatttagtatattatgctcaactgattcttttattatttaactaaaacttcaatattttcatcttttccatctataactatagtacatccattatacacatctccagcaataagtttctttgcaattatagtttctaatgtatttcctatatatctcttaagaggtcttgctccatatacagggtcatatccttctctcaccataacatcttttgctgaatttgtaacttcaatagtaatatctttttcttttaatctattttttaaatctttcataaatatatctataattttcttgatattttcttggtctaaaggcttaaacattataatatcatctactctgtttaaaaactcaggtttaaatctatgcttcatttcattcattactaaattgttagtagtctctgttatatttcctcctgcttctaatagataattacttcctatattagaagtcattattataagagtatttttaaagtctactgtcttacctttattatcagtaagtctaccatcatctaatatctgtaagaacatgttaaatacatcctcatgtgctttttctatctcatcaaatagtattacagaataaggagcacgtctaactgcttctgtaagttgaccaccctcttcatatcccacgtaccctggaggaggtccaactagtcttgatacagcatgtttttccatgtattcagacatatctattcttattatattatcgtcactatcgaataaatttctagcaagagtttttgcaagttcagttttaccaacacctgtagggcctaagaaaataaatgaaccaattggttttctttcatcttttaatcctgctcttgcacgtattactgcatttgaaactgctgtaactgcttcatcttgtccaataactcttttatgaagttcatcttctagtttaagtaatttttctctttctccttcaactagtttagttactggtatacctgtccactttgatacaatgctagatatttcttcttcagtaacttcttcttttaaaagagaattttcagaaccatcattcatattttcttcgtactgctttatttgttcttctaacttaggtatttcaccatatttaacctctgctgctttgttgaaatcatattctctttcatacttttcagctttacctttagcttcgtctaattgagcctttaagtttttaatatctaatatttgactcttttctttttcatattttgctgtcatttcatcatttttagattttaactctgctatttctttttgaatatcatccaatcttgatttgcttttatcatcattttctttaagtaatgcttctctttcagtttctaatgtaaataactttcttctaacaacatctaattctgttggcaatgaatctatttcactacgaatcatagctccagcttcatcaattaaatcaattgctttatctggtaaaaatctatcttgtatatatctatgagaaagttttgctgctgctacaatagcattatcatgtattcttactccatgatgtatctcaaatctttcttttaaacctctaagtatagatattgtgtcttcaacagtaggttcttctgcaattacaggctgaaaacgtctttcaagagccttatctttttctatatactttctatattcatcaaaagtagttgcaccaatacagttcaattcacctcttgcaagcataggtttaataagattacctgcatccattgaaccttctgttttaccagctccaacgatagtatgaatctcatctataaacagtataatctttccatcagaactttgaacttcttttaaaactgcctttaatctttcttcaaattcacctctatattttgcaccagcaattaaagctcccatatcaagtgagaatacaatcttatcttttaaaccttctgggacatctcctcttactattctctctgctaacccttctacaattgcagttttacctacacctggctcaccaatcaatacaggattattttttgttcttcttgataaaattcttataatccttcttatttcttcatctctcccaattacagggtctaatttatttttcttggctaaatctactaagtttgttccatatctagcaagtgcatcatatgtgccttctgggtcttgtgtttctactctttgactacctctcacttgtgataaaatatttaaaaagtcattcttatttatattatattgttttaatattttaccaacagctgattttgattctgtttccatcattgcaagcataacatgctctacacttatatatgaatctttaaattctttagaaatactctctgcctttataagcacctcatttatttttctagtagctgatactccttgtgagtcagcaccttctccatatacttttggaagcttatcaatttcaaagtttacagtatttctcaaagaatcaattgatatattcattttttcgattatatttggtatcaatccatcctcttgattaataagtgctgagaaaagatgaattacatctacttgttggttatgattttttactgcttcgttataagcctcatttaaacttttttgaactcttaaagtcattttttctacgtccatataaatccctccattttaatattatatccaaataaattaaattctctcatttataattattgattttctaagctctaaaagactatcaagtaaattctcgtttttttgtatatcgaaactcaatgttaaattaaatgttccatctgaattaaaaaaatcgaatacttcttttgattttgctattaaatacaagtcttcatctataagtcttttttcacctattaataaatactgacatttatctataaaactctttttaaaatcaatagtgtatagattttctaaaatattatattgataaatagcaatattattaaacacttttaatatgtttgaatttacaaaattgtaaatttgattattgttatacagtgatatttgttcgtatatatattccctaaataaaggatgaatgttttgcttaagttttaaagtaacttcagctggtatttcaaaataaagcttccagtacttagagttatttttttctaaaataaaagctactttgttcaaactggtagaactaatctcctttagtgtacaattaaaattatagtgtctcaaactagttttttcattctcaaatacatagtcaaaccactgtagaacatttctatcaagttttaaactcatataaaaaccttcttccttatttactaaccttattaggtctttttatctgattatattctgctaataaactttctttatcagctctactacctttatatgctatatgtggatttatcatatactcaccatttttcactctttgtaaaaaatccatttttttcaactccgtaaacaatgaagataaagaagtttttggatattcaaattcacaagataattcatataatgtttttctaatcttattatttttatccatagagtttattaattttaatggaattaaatccctcttagtatacattccttctactactttaatataattcttaaaacaaatattcatatacttacttttattcataactaaacttttgctctctgtatattcctgatttaaatccttttttaatgtcttatccaaattaaatatctcttctcactctccttatctctaattgataatataaatatattacaaaaaaatatgtatgtcaaaactgaaaatgcaaaaagtttaccttataagtaaacttttgtttagctataagctaaactttattatttttttaatttagtatttccaatttattggcaggatttttgaataatatttataaattttttaaaaaaatttaaatctatttaatatggcagcctttcataaaatacattacatttattaaatgtataatattggtaattagttttttctaaaatcagttgacatattatatatatatttatataatgtgtatatactatatatacaatttaaggaggtgacttattgaatatagttattagtaattcgagtgggaagccaatatatgaacagattactacacaaattaaaagtatgattataagcggagagttaccagaaggctcagctcttccaagtatgagactattggcaaaggaacttagaataagtgtaattactacaaaacgagcatatagcgatttagaacgagacggatttattgagacagttactggtaaaggcagttttgtatctagtaaaaacatggattttgtcaaagaagaacaatttcgtttaattgaagaatacctacaaaaagcagttgatacagcaaaaagtagtgatattacatatgacgaattaaaagatattttatttttattatataaaggagaatgataagtatggatgcaataactataaaaaatttaaataaaacttataaagattttagcctacaagatatatctttttcagtaccaaaagggagtgtaatgggatttgtaggtgaaaatggtgcaggaaaaacaactacattaaaagcaattttaaatttaatatcttatgatagtggaaatatagaaatatttggtcttgatagtaaaaaaaatgaaaaagaaattaaagagcaaattggggttgtatttgagggaagcaactttcatgaaaatttaaacactgaccatgtttcaaaaatcatgagtaaaatctataaaaattggaatgacacattatttaaagactacttaaaaaaattgagagtaccagacaataaattaattaaggagttttcaaaggggaataagatgaaacttagtattgctgtagccttatctcataaaccaaaattattaatactagatgaggcaactagttcacttgaccctatcgttcgtgaagaaatactagatatatttttagattttatacaagatgaagaacactctattatcttatcttcacatattacaagtgatttagataagatagcagactatattacatttatacataaaggaaaaattgtatttagtgaaaataaggatgaattaattgatactatgggagttttaaaatgtaaacctagtgattttgataacctttcaagagaggattattcatattatcgtaaaagccaatttggatatgaagtacttcttaaagataaacatagatttatatcaagaaatccaaattgtattgttgataatacgtctatagaagaaattatgttattttatgtgagaggtgataaataatgaaaggtttaattttaaaagatttacttaatttgaaaggaaatgtaaagtttatacttttattcatcattatgtttgggtttatgtcttctttaggagatggaaatgttaataactttataggtgttattatagttttatgtactacaatgattgtttcaacattttcatatgatgatttaaataaatgggatagttatgtacttacaatgcctattaatcgcaatgatattgtattaagtaaatatttaactatgttaatatttagctttataggtgttcttgtttcacttattgttagtgtaactattggttattttaaaaatacacttatattaaatgaaacactacttattaatgcactaatcttatcaatttcagtatgttttggtagccttattctaccacttatttataaatttggtacagaaagagctcgtttattaatgattttatgctttttagttccaacactagctttattagtttttaaaagtattttagaaaatattagttcacctatttctatagaaattatacttaatacactagtatattctcttccatttgttgctattttactatttgtgatttcatattttatatcatcaaaaatctatagtaaaaaagaagtataaaatatactatacatgtctctgtatttaagtattttaaataaaatactatcaagtttattttggtagtattttatttttttattattaatatctactaggtatttattgttttattacttatatttaataagactatttactactttctaatcttatttatataatttattcattttataaattgaactactaatgatattattgaacatagcaatagaataacatctaaaatagtttttatgtattaaattaacttattttaatattcaacaatttaggtttactaaatttattgatgatttctttttatataacttaaactacatttttattttaaaaaatttaatatcaacaatataaaattaagaataagtattattagtttgacattagcataaatgcctattagaataatgttaaactatattctttctactgattttattaaaaaataccaatatacaaaagattatacaaggagaaagttcaaatatggaattagaaattacagaaaaaatagaaaaacaagatgaagatactatttttcaaggattattaaaatataatcttgctagacttgaagataaaaacccagtggatttaggaatatatattcgagataaagcaggtaaaattgttgcaggttttataggtgttactcatggtaattggctttctataaaatacttatgggttagtgagaagcttagatataaaggtactggaagtcaacttttatataagactgaaaaaattgctaaagaacgaggttgtaaatatgtttttttagatacattcagttttcaagcacctaaattttatgagaaatttggataccataaagtattttcacttgaaaattatcctctaactggaaagagatattattatagaaaaatactataataataaaaatcatattttatatttttaacttaaaacttctgctcttcgtctacagactttatgtttttatatcattattaatactaaaatagtattttactatacatacaaaattatttgaaagttcaaaaattataagtataaaagctaatcttagcttaaataaaaattatatttttaggaggtaaatatgttaggaaaaaaatgtatggattatctacaaacattaggaaaaataagttcaacaacaaatggtcttacaagacttatcttgactcaagaacataaaaaatctattgatttaattagttcatggatggaaggtttaaatcttgatattgaaattgatgacattggaaacgttataggtacatataaatcaagctttccaaatgctcccacattagtagttgcatctcatcaagatagtgtaaagtgtggaggtatatttgatggtatgttaggtataatagtgcctctagttggtcttgaagaagcaaaacacaataataggtcttatcctttcaatattaagctaattgctttcgctgaagaggaaggaactagatttgaaacttctttaatgggaagtaaagtttttgctggtacttttaaagaggaacttcttaaatctgttgatgaaaatggaattacacttgaagaagctgtaacaaagtttggatttaatacaaaaaacttaacaaatttgcatcctagaaaagatgtagatgcatatttagaatttcatatcgagcagggtcctgttttagaaaatgaatctcttcctgctggaattgtatcaagtattacaggatttaaaagttttaagatatcagtaaatggtaagtctggacatgctggtacacttccaatgaatatgagacttgatgctggatgttgtgcctgtgaatgtgtattagctatcgaaaaagtagctaaaacgactgctgatttggttgctactgtaggaaagatgaatttctatccatcttcatcaaatgtggtacctgaaagagctgaatttacactcgatgtacgctcttgttcacaagaaattcttgataattctgtagaaaagatatttaatgaaatatcacatatatgtgaaaatagaaaacttaattatacaagtgaacttgcttttgaaaatgttcctgtaccatgttctaataaaataacaaaaatcatagaaaaaagttttatagatttaaatcttaatcctttttatatttatagtggtgctggccatgatgctcaggaaatggataatataactgatattggtatggtatttataagatgtgctgggggcgtaagtcataatcctaatgaaagtgtttctgtagatgacttggatactgctgtaaaaatatttttaaaaatactagataatcttgatttaaaataatttttatataagaaagtatattaaaatatataatctaaaaaatcactttatatttatattatacaagtgtacaatataatctattataaaatataattttatgcttttatagatttttattttatacataaatatatttatatataaaggagataatttttatgaatgaaaaattaattggtattttggctggaatgggtccaaggtcaacagccccttttgttgatttaattattgatgagtgtcaatctcaatatggagcaaaatatgatgatgaatttccaaagatgatgatatattcattacctaccccattttatattgaccgtccaataaatcatgaacttatgaaagaaactataattgatggattacaaaagcttgaatcaactggtgtaaattttattgcaatgccatgcaattcagcacatatatactttaaagaattaaaagagtctattaatataccaatattaaatattgtagaagaaacagttaaaaaattacctactatctcacaaaaagtaactcttttttcgactagttcaacttttgagtctacaatttaccagaatggtataatacataatggacatgaatttatatttaaagatgaatggcaaataaaattaaacaatcttattcaaaatataaaaatggataaagaaaatccacacaatattgatatttggaataaacttatcgaagatgttaaaaatgaatctatagaaaatatagtaattgcttgtactgatttaaatgtagttttagaaaaatcatatccttcaataaatattgttgattcatcaaaatgcttggctgaatcagttgtcaataaatatctaaaattagttaaataaatttttcatgcactatattataaaaaatatatgttataagtttattttaaatagtatagacttataacatatatcatagtttcttgacaatatagaaattaaccatgtatttcattatattaataaaaaggataccaaaaatggtatccttcataaatatttatatgtttatttataaaaataatcatatatttattactttactacacctaaacaatattattcaagtgtattcatagagttagaaaattcttgtcctgctgtaacaagattagataacaatacatcagctactgcatcatttactgaacttattatccatttattatcctttttagaacattcaaactctacagtttttgtaacataagtctctttaacgcttttttgtttttctttcataattgatactaacatttcagttgttttctcatcagttaagtcttgtcctgaaaaactcataccaatcatctttgtaaatgcctcagctactatttcttgaagtaatggtgttgaatctataaatttacattctactttgattgtagccttatcacctttaacctcgctgtcttttattgtatacgtgattttagatgcattctgttttagataatctaaaacatattgggcatttgggtcttttgtatctaattcctttaatatatccttatatttttcgtcattattttccattaccttattcatgccttcaaagtcaaactttttcgcactgttaaaaaaactatcaattgtatcttctggttttgcacttgaacatgctgttaaagatattgctaataaaaaagttgttaaagctaatatgatttttttcatatctcaaatcctccctcttaatttgttgatacataagttattttaacatataatgagagtttttgaataatatatttaaaatattttataaattttcattaaagtaaagtctatattaaaacatatctatattaaattattgttcatatttacatcagtcatagtagaaaccataacagcttttattgtatgcattctattttcagcttcttcaaatacctttgaatattttgaattaaatacctcgtttgtaacctctaattctgataatccgaacttttcataaatcttctgagcaaccttagtttctaaatcatgaaatgctggaagacagtgtaaaaatataacattttcattttcagttttctttatcatatccatatttacttgataatctttaagttgatttattcttgcttcatattgctcctcttctcccatagaaacccatacatctgtatatataacatctgcacctttaacatcatcaatattttcagtcaacattatatctcctttggatttcttggctatttccttcatttccttaaccaattcttcatttggccaaagttccttaggtgctagtgctacgaaatgtattcccattttagcacatcctatcatcagtgagtttcccatattatttctagcatcaccaacatatacaaatttaactttattcaaatctttatctacattttcaattactgttaaaaaatctgccagtatttgtgttggatgatattcatctgtaagtccattccaaacaggtacaccagaatattttgctagactttcaactgtttcttgtttaaagcctctaaattctattccatcatagaatcttcctagaacttttgctgtatctgatacagactcttttttacccatatgacaatcatttggacctagataagttacatatgctccttcatcatgagctgctacttcaaatgaacatctagttcttgttgatgttttctcaaataataaagctatattttttccttgtagcaaatcgccttttatgccaacttttttcttagtttttaaataacttgataaagttaataaatatctaatctcttcttttgtaaaatcctttaatgtcaaaaaactcttaccttttaaacttatattattcatattaattcgccccttcttataaacttcttaaattcaattaaacttgttagcactttacttttttatttacttctaatttttatctttaattaactattttttgaatatttagttaatctctagtaatatatcttttaggatttcaagagcctcatctatttccttataactgattgttaatggtggtaaaaatctcaatacattttttccagcagtcaaaataagcaatcctttttttctagctttctcttctataatactagattcaatattagtttcaattcctatcattagaccaataccttttgtctttaatacaactttattattaaaactttcaatagattttcttatataatttcctttttctaatacttcattataaaaaccatctttagatatctcatctaatacaactgaagctgccaccatagctaataaattacctccaaaagttgtaccttggtctccttttcctagtacttttgaaagttttttatttaccaatactcctcctactggtattcctgctcccaacccttttgctacggtaactatatctggttttacatcaaaatattcatagccaaaaagtttaccagttcttcctataccgcattggacttcatcaaaaatcactacaatatccttttcttgacatatttttactatttccaaaacataatctttttcaagaacattaactccaccttcgccttgaatcgcttcaagaattattgcacaaactgtggaatcaagattattttttaaatcttcaatattatttctttctatatatttaaaaccttcgggaagaggataaaaatacttatggtatttgtccataccagttgccattaaagacatcattgttctaccatgaaaagagtcttttaaacttatgatagttcctctaccattaccatatttgtcactactatactttcttgctattttgaatgctgtttcatttgcttctgttccagaattacaaaaatatactttagccattccacttgaattaattattttctctcctgaatacaacactggctcattaaaatataaatttgaagtatgtaataatttatctacttgctcttttagagcattctttaaattactattactatacccaagagaagatactccatatccacttgtaaaatctatgtatttattgccattagtatcaaaaaaacaacttccttcaccataatctatgacaaaattgggttggttatatgtatctataaaatattcattccattttgaaattgtattgttgttattcattcttattctcccctcttaaacttataattttattcattttcttttcttattaatgtacctattccactatcagtaaatagctctgttattatagaatgtggaactcttccatccaaaatatgtaccctatttactccgttatttaaggcatctacgcatccctctattttaggtatcatacctccagtaattataccttcttcaaataatttatcaacatcctctaatataacttctgttattaatgatttttcttcatctggctctcttaacaaaccagggacatctgtaagaagtatcaatttatctgcatttaactctttagctatagcagaagctgctgtgtcaccatttatattataagtctctccatcatctccaacacctatagttgcaattactgaaatataacctgactttagacaagattctataagctcaacatttacttttttgatttctcctacaaatccaagttcataatttttatatgggtcacataaaatcatattattatccattccacaaagccctactgcttttccaccttttgtatgtattttatttactaggtctttattaacctttccagcaagtaccatttttacaatttccatggtctcttcatctgtatatctaagaccatttacaaatttactttctatatccacttttgctagcatcttattgatttctgcccctccaccatgtactaaaactatattgattccaacataactcattaatacaaggtcttccataacagattcttttagaccatcttttttcattgcacttccaccatacttaactacaatagtctttccctgatgtttttctatatatggtaaagcttctataagtgtatttgctttttctatattaatcattaaagtatatcctcctaatttctataacttccatttattcttacataatcatagcttaaatcacatccccatgcatttcctctggcattgcccatatttaaatctactaatatacttatttcgtcatcttcaaggattttttttgctttttcctcattaaaatctaatccatttccatttttacatacttcaatatatcctttcatactctcaaaaataatatcaactttttccatatctatttcttcacctgcataacctaaagcacacagtattctaccccaatttgcgtcagctccaaatacagctgtctttactaatgaagaagatataactgtttttgctaattttactgcatgttcttcacttaatgctccatttatataacattcaattagttttgtacatccttctccatcttttgcaacaagtttagcaagttctatacagacatatgtaagtgcactcaaaaatacttgataatgttcatcttttttgtttattctatcattttttgcttttccatttgctagaatcatcaccatatcattagtacttgtatctccatctacactaactctattaaaacttttatcaacagcaattttcaaagcttcttttagcaaaactccatcaatatttgcatctgtagttataaatcctaacgttgttgccatattaggatgtatcatgccagaaccttttgccatacctccaatagttatttttttatctccatacattattgctactgctatttctttttttataatatcagttgtcataatagcttctcttgctccaatatgaccttgtttacttagattattcactaattcatccatattttcttctattaaatttatatttaatggctttcctatgacacctgtagatgcaaccaaaacatcattttctttaatatttaatttatcactagtgaatttagccattttataagcatttataagtccttcttttccattaaaggtattagcattagcactatttactatgatagcttgtgcttttccatttttaatgtgttcctgtgtaacataaacaggattgccctttactttattttgagttactactgctgctgcatcacataaaacatctgaataaaccaaagctaaatctcttttttctttattttttctcaagccacagtgaatccctgaagcaaaaaatccttctgaaactgtaactccaccctttataatctccatatttatcctcctaattatatgagtttagtattttttcattactaaaatgatggtgcaatattttttaaacctgtattttcttcaataccaaatattatattcatgttttgtatagcttgacctgctgctcccttaatcatattatctatagctgaacagattatcaatgtatctccattttcatgtaatgatatgacacatttatttgagaacctaacattctttaaagaagctaccttatctaatgggagaacttctataaattctttaaattcataataatcagttaattttctatgtatatcatttatagaaatattatcttcttttgtacaatatatagttgataagattcccctatttactggtattaagtttggtgtaaaaactacacttactttttctttgcaggattcacttaaattttgttctatttctggagtatgtctgtgtttccctattttatatgcagtgatattttcattaacctccgtaaagtgactactaatcgataattctctaccagcacctgtaagacctgatttagaatcaattattatattattattttttatcaatttagaacttagtaatggcatcaatggtaaagaaatactagttggataacatccaggatttgcaattatatctgcatcttttatatcttctttgtatatttcacttaatccatatacagcttttttatgtaagattttatctataaaagatactccataccatttactatatacttcttcatcttttattctaaagtcagcacctaaatctataactttctttttcgatttaattgcttttattacaaacttttcactaactccatgtggaagggctgtaaacacaacatcacacatatctataactttttcattttctatacatatcatgttatttttatatcctatacttggatatatatcaactatattttttccaacatacgaatttgaacctattgctgtcacttcgactttatcatgattcattaataatctaatcaactctgccccgacatatccagttgcgccaataataccaacttttattttattcattttgttccctccatttttatattcaaatagtattaaaattctatctttccactttactatatgataatcatttgataatatgtagattaaaatattctaattaaaacaaaaaaccccttagcattataaatactaagaggcgattttccgcggtaccactctcattggtaaaattacaataatcattaaaactcaaattaaaaagtatctacaaaatgtacatttaaaattaaaaaagcctcttggtcaaagaccaagagacgaatatacacccgcgttaccactctaattgataagataatcttacccactctaatctcttaaggcgagattcaccaattaccatactattacttctggtaatctcctccaaagctctattcacaataaaattcgttactaggcttccaccattcccagctctctatcaactagctttatgctactctctttttcacaggatttcaatttattttcttattgttttatatgatagtttatttttttaactttgtcaatataatttttaaatttttggaaatattttctatatggttaatttccagcattttgtatctaaattgagttataatctttatattatcattcatcaacttaagaaatttccaaaatatattggattataaaataatgtaatctcaaaatacaatatttacatctatttttagttaaatttttttaatgttggtatctaaaaatttctcaatctttttctcagaaagtatctcgttggttacaaattcaccattaaaaaaaagactgtatgtagtaaatggtgcaggagcattttgtgcttcttttgctgtttcgaattttataagatttacatcaatacctctagaatttgcaatttttttcaaaataggagcatatttttctgtatgtggacactgattactgtaatataaaactataccgttctcatttaattttcttttttttacacaattcttaaaacatggaataggagcattatcagtaaagggaaaatataatagctcataatttggttctgatgtatctgctaaacaaaagcccttatattttagatatttagcatcagataaaaaaggcatttttttactagacgaaagcacaactaatccatatttaccttttgattttgcatcatcaacacactcttgtagcaatagattagaatatccttgacccttaaattttccagatatccaaaaacagttaataaatatataattgtccgcagtaataggacaccatgcattttctgctggaatatattctataaaagctttacctcttacatcaaatcgtttaaaggctagacctttatcaaaattatttttcatccaagcttttttagaaaaaacacaattttctccttttttttcagaaattgaacagcatatatgtctactgtcaatattatttatatttatatctataatctgcatacttatctccttttctaattacataataatttttaaatatattctatatatttttatcttaatattttgaatacaacaacatcatgtcatatatatttttattttacataatattatttttagattatttgaattatcaaattgcatatataattaaatacattctaggtctaaccacactatatataaactatatattatcataatattctaaatttataaaacaaattgtattgaattaaatttatttaagatatataattataattataattaaaataataataaaggtgttgtttataatgttcaaagaatacttaataagagaattaaaagaagatgatattaaaaatgcattagacttaatctggaatgtatttgaagaatttgaatctccagattattgtgatgaaggaattacgacatttcatcaatttatagaatataattctattattgaaaaaatcaaagaaaaaacactcttcttttggggttgttttgactctaaaaaacttattggagtcttagctattagaaatttaaatcatatatgtatgttatttgtagataaaaactatcataaacatggtgttgcaaaaaaattaatgactacaggcatacaatactgtatttgtaataaatttaatttaactgaaataactgtaaattcatcaccttatgctgttgaagtttatcataaattaggatttgaagatattgctgttgagcaaattgttgacggtatacgttttacacctatgaaattgttaatataataaattaaataaaaagcaaagtctcttaaatattttatagttactttgcttttaaaccaagatttaaaataatactatcttttttgttttttaataatatactttaaaagccttactaatatgaactataatttattttttgatatcctttttgattaacatataaattaattcaattattaaacataaactatgttgtttctctttatatctcttctttgtaaacaatattgggcatttgaaaataaatattcttaaaatatactgttctcctgttgattttcctttggtacaaatgataaaattttaatttacatgctccgtaatgaagtgtttaataaataagttaaaataatttatttacctccttaatcatattttttatgaatacctaataacacagtatcaatagaatcggctaaaccttttatagcttcttctttactcaaaagtgatttcccaagttgcaaagtcgaataaccatgaagtacactcattattaagtttaatacttcacctgtattctttgtatttagattacaagaaagaataagtttttctaataaggatttatattcatcaaagatttctaatgtttcattatttccatgccaagtagcccactgaattgtttcataaacaccaggattagaaattataaaattaaagtatgctatacttatacactttatagctgtatctccaaaatttccaatagtcgcctttatcatttgactattcatctctctcattcctttatgagctacttcaagtaataaatcatctagactttctatatgattgtacaaagatggtgtacgtattcctagcttttctgcaataacttttaaagaaactttgttaagcccatctttattaactatatctgatgtagcttgtataactatttctctactaacacgcatgattttccctctttcatttaaaattaattactttattagtttagctaatctaattagtttcgtcaattattgtaatttataaaattctttatactcttataaaatcttgacagtttaattataatttaatataatactaattgaattagttttaatactaatataattagtattatattaaattatatattacaacattattttatagtttgattaattcaacaatcactaatatatcaaactgaaaggagatttttatggaaaaaaaatatttcgaaattcatggagttccttcaatcctttggggaaatccttcaagtaaattatatatttacatacatggacaatgcggcaataaagaggaggctgaagcttttgctaatattgcagttccacatgagtatcaagttttaagtgttgatttgcctgaacatggagaacgtaaaagagaaaaaaattcatttaacccatggcatgttgttccagaattagtatctattatggaatatgcaaagtgccactggaatcaaatttcgttatatgcaaatagcattggagcatggtttagtatgttaagctttgaaaaagagaacttaagagagtgtatttttgtatctccaattctagatatgcaacagctcatttcaaatatgatgctttgggcaaatgtatcagaagaacagcttaaacatgaactaattatcccaacttcatttgggcatactctttcatgggaatatctacaatatgtaaaacaacatcctatcactcaatggaatgtaccaacaaaaatattatatggtaaacatgatgaacttactgaaatcggtgttgtagagaaatttgtagaaaagtttaattgcaaccttactattctggaaaatggcaaacattggtttaacacaccacaagaattaaattcattatatgaatggttaaatactttagttaaataaaaaataattatattattaatatgattaaattatttataaatgttatttaattaattttattttagcattattaaaataactacataaagaataaattagttattattaaagaaattaaaagtatatagagtattaataattttttaataattagttattatagaaaaaagagggatataatattgtctccctctctttcttctgtaatattatataatttttatttatcactctcaataaattatagttatctacaaaattcaatctttaatacattattaatatattgtgatattaatattacagtattaaataaaatctaataaaattaactataaaatatctattatataaatatccactcttatgtttgaaatctgtcatatagttttatccttcttatcttttatatcaataactttttttaataaaattgacaaaacaaagtaaaaaaccttattgataatgaaacaaatgatactataagttctgatattatagtaattgcatataaatagacatcataacaataatataatattgtcactataaaattaaatgtaaaaatctccaatctaactaaatacacatataggtattttttaagtttttaggtatttcttctgaaaatgatttattgattgataccaatttacataatctttttaatataaacaatgatacaatatatgggacagcacatatgtatatagctacttatattacatattacagttggcatattcgtatttgtaatgcttataccaattttaaaatacaccatcagtactaatggcattaaaataatctataataaagttaaaattattccaattagtacaatattatttaatattttacaactcatattcttttttatataaatttaccaccttatacattcttatttttagtgtatattataatggttttatatattatatcaacaatttattattgaaattcaataaattatatattataatcaataatatactttatataaaggagatgatattttatgattacaaaattttttagtaatatattatcagtatttctatattttctattatcacttttaggagttgctggtataatattcttatgtatgatacctatgtttttatatgattttagttctgacaaagtaatcgctttaattgcaagaatactatatttttctgactactttatagtcatcttattcttgatatttataattaatagtactaagtattccccattcatacttgaaaatgtaaaaaggtttaaagtaatgggatgttgtttattgataaacactataattgaatgtgtaattggttataactcaaatactagtcttataatgatatttggagataatagtggcggtatctcaccacttatggttatttcttttatatttgcactaatgtgctttgtaattgcagaaacatttgataaagctataaaaataaaagaagataatgatttaacgatatagaggtgatgttatggcaatagtagttaacctagatgtaatgatggcaaaaaggaaaatatcacttaaagatttggcagaaaaaatagatattacaaatgcaaatttatcaattttaaaaactggaaaagcaaaagctattagatttaccactctaaacgaaatttgcaaagctttagactgtcagccaggtgatatacttgaatatgtagaagatgaaaatgattaaaaaagagtgtttagaaacactcttttttattatactatatgatttttattcttttactatattattgacattaatattaactttgtttaaagtcataacaaaatacgttctaagaaagaaactgttcctttttctatttgttatccattacctataagaactgtatcacactaaatcatacttttaaattgataattttgccacagattcctatatacattcttttctacctaatatttatttaaactgttagcaaaacatggaactttttcatttacttatacctccatttatattattgcatagtttatagctacgtgttataaattacattattgatgatttatctaacatttgtaatcttttagatactctttgaagttacaacactgttatactctaattaagtaaactaaatctgatacaagttggtgattatatgaaaagaaaactttcaacctattttaaaggatatattttaggtttatgtatagcatttttattatttacttttatattaaaaaaattaattatagaaaatatcattggaataataattggaactggaattgcatttttactgatttacctatttaataaaaaaagaaaataatattctataaaaaggtcttttagtgaatttacaaaaaattaataagaataatatatacttagtatttaaaaagggtaacaactctctctagctgttaccttatatatttatctatatctttagtattaagttttttaatttctacttttttaattatcaatttctgtatgtagatatactaaaccttccaacttgagatttaaataacttttcaatctcataaactattctatacaccttattttcgtactctaaatcataatacacatttatttcacctatactgtttacacttatcgtataatgttctttttctattatacatattcttccaaaatctgacaggtcattatctatcaattttaactgtttttttatttttgaaaaatctaatcttggaaatatgtcattaggataaaaacttttattatatacaagcatttcatccaccccttatttattctatttatatcattttataccctaattaataatttattaatcatctttttccatattattcaaattctcttatataaaaacaaaatcaatttagaatatgtattattaaatataaagtgactcaatctttatttaataagaaaaaacatttatattacatataattaatataaaactaatgaagtgggtgtatgaaagagaaaacacaattttaatttacattccatatagttaatataaaacagttgtttttattttttctaaagagaaaaaactagactttacattccatatagttaatataaaactttctgtatattttagttgtgttttaatattataacactttacattccatatagttaatataaaacatggcagtaactaagaagaaaactataccttttttattctttacattccatatagttaatataaaacgaggaaattttatactaatgactgatgctagatttaactttacattccatatagttaatataaaactattataaggagcattatacgaccaaaagccaaagcagctttacattccatatagttaatataaaacaagcaacagcaagagtcgcgacaacattaaaaacttcctttacattccatatagttaatataaaacctttatttttttctctatatcgagttcgccaaattcactctttacattccatatagttaatataaaacagtccagcgttgtgtggtcgtaacacaccaatcctactttacattccatatagttaatataaaaccccaaaataaattaagtatttccaatacttatacatatacaattctcctaaacttgcagtgagcgagcaatagtgcaattgataacagttatcatacactctcaacgctttatatttcaactattaaaccctactttatcacaaaaatcgctcactgcaaaacttttatatttttattatatcataaaactcatactataaaataaaaatgggataattttacaaactaaaagcatctacattcttataagtatttattatattctctattccaatgattcctttttctttttattgcatccttcctatgtaatcgcactttagctcaacaagtcttttattttcattaacaattttttaaactattcaaaatcatcaaatttttcatcttatacagttaaatcaaaatacgtgttatatctctttatctatatacttttcttccttccatttctttttctctttctacattttcactttgttactttacaatctcaaggttattatctgctattaaagttttatctttccaggtttcacaaaaataaattgaataagtgcaaaaataacagatacaaaaccataactattttcttttctataaaaaaatatatcatcaacaagaaacataataaatgaaaataactatgaataaatactctcatttagaagaaatagacaaagatattccttaaaatttaagcaaaatattgtttaaataaaaaaactgactgtcagttaaatgccagtcagctattttatatattttatccaaacatcactatatttgaacattttaataattaataatacttattaatatacaaactttactcatacacagaatatcttttccaaatttgctctaaatcatcaaaatgctgtttaatatcttctttttccttcattccaacagatatagcaagggcatttgaaatactaagagctggaactagagaatctacaaatgaagccatattactcttaactagaagagtgttatctgcaagtgatgctactggcgcaaataagctatctgttaatgatattacatgggctcctttttctttagcataattgacaatttgataagatttcttagaataacgagggaaactaatagcaactattacatcttcttcatttattcttacaatctgctcaaaagcatctcccatatccattctaattatatgaacattgtcaagtattatatctaagtaaaaacctaaatattgagctactacaaaagaactcctcattccaagtatatatatttttctcgctcttaaaagtttgttagaagcttctttaaacgctctctcgtcaatttcttctagtgtagaccttatattatctatatcactttttaaaactttgtttagtattgcaaaatcatcggaataatcatgtgccatttcaactctttgtactgtagttagtttattttttatgagttcttgaagtgcagcttgtaatttaggatatccactataacctaatgcatttgcaaatcttacaactgtagactcacttactcctacggtttcacccaatttacatgcagtcataaatgcaactttatcataattatttaaaatgtattgtgctataagtttttgacccttactcaatctcgtatattgagattgtatatttgatatcaaatgtttactgtccttcatttcatttgtttcttccatttttttctccttttagttatataaactattttgttttattaacactgtctttttctctaaaaattttattttttatctcaatttcatcttagtttttatcatagcttcttaaactcataaaattctaacttttctgtaccttatacttcacatagtattttcgattaaatttattataccatctttccttgcattttttaatatttatccaatatttcttttaaatttttcaatttttactcatttaaaagttatctatcttattttgcatatttagatgtatattttgttttgagaataagctgttgtatacttattatttaaagtatttttaataggtcacactatatatattaactcttaatagaatcttgtcaagttttttagtatttattatgcttttttcttttcaattaaaatcaattgtggtgggttattgacttgatttaaaaacttagattctaaaacattaaattcatcttgatttaaattattgacaaggttatatatgcaatctttttcttcttgacctccatcatgccctgtatatatggcaatgcttattactccattttcttttaacatttctaaacttaactttatagcctttaaagttgtatctggtttggttataattgaatgtttcgctcttggaagataacccaaattaaataaaacacatgaaacttcttcttttatatattgattcattttttcatgcccatcaaatatcaactttactctatctgtatatccttctttctctagtttctttcttgtagactttattgcttcttcttgtatatcaaaagcatatacaaagcccttttctccaaccttctcagctagataccttgtatcatacccatttcccatagtagcatcaattactatgtccccttcatttataatattttctaaataaaatttatttatatctgtaattttagttaaatactttgcatatgccataatactatttctccctactattaactttatttcattttttctcaatttatttttatcttattttattgattttaaatattttatttcatcttctgttaggtatctatattctccaactttggtgtcttttaatactattttccccacagaaatccttcttaaatttaaaactggatgatttatagctttgcacatttttcttacttgtctatttctaccctcatgtatagttatttcacacactgaataatttttttctttattttctttagttacccttattttggcaggtgccgttgtgtaatcttctatttttagtcctgtttcgaattgtcttatctcatcatcacttataattcccttcacacttgccacatacgttttatcaatttcatgctttggatgggtaagcttatatgttaaatcgccatcattagtaagtattaataaaccactagtttcataatctaatctccctattggatatactctttcccttacatctttaagtatgtctattacactgggtctattgaattggtcttttactgtagttatatatccctctggtttatttaatactatatatatataattttcacttggttttacttttttattatcaaattctactatgtctttttcttcatcaatattaaaagataactcttttactacacttccatttacctttattcttcctccaagaattatttcttctgattttcttcttgatgctattccacaagaagctatatacttattaattctcatacttaatccttccttatcttaaattatgtgtgtttaatatttttatcaatgttaattttgctacattattatactatactagaccttaattaaaaacaagcaaaaaaattatttaattttcctaaataattgtaatttcttttcacatactattaatatgtaatagctgactaaacactattttaaggaagtgattattattttaaaggaaaatataaaatattatttaatagtcgtgtttattggaattttattttttaaatttattaatactccatcaaactttatatctagtattgaaggattcttaaagttttttagcccatttttattagctattttacttgctttacttttaaatccacttgtgatgctttttgaggtaaaattcaaagcacatagacttttagccatttttttatcttatatatttataggttttattttagcctttgccattaggctattaattccatcaatagctaatacattaaatagattgataaatgaaatgcctatgtatactgattatatagatagttttatagaaaaaaatatgtcaaacatagattttctaaaaactttaattcctcatatacaacatagtttagataatttattaaaagaagcaagtaattttgttggtaaaattcctaaaaacttcttaatctatacacttagtatatcttctatgctatttaatatgacaatgggatttatactatccatatacattatatatgacaaagaaaaaattgcattgggatttaagagatttctatattcttctactgctagaaacaaggcagataacattatagaattttttaggactactcatgatattttctatgattatttacttggtagaatattagactctcttattattggtataattgcatttttaggatttcaatttgttatcagaatagaaaatgctttatttttagcttcaataatattcttaggtaatataattccctattttggtccttttattggtgcaatccctccaatagccatgactatattatatagtccacaaaaaactatatgggtcattgcatttctatttatattgcaacaattagatggaaattttatagaaccaaaagttatgggtaatcaagttggtataggagctatatgggtaatatctgctattttggtgggacaatctctatttggtttcataggagtttttctttcagtaccaatagctgctgttgtaaaaacttatgttgataaatatatagataatcgtttacaatagcttatctctactgtgactttaatttttagtttaaaatttaactgttatttattaaattatttctcaaaaaatatctcttagtaagaaaaaattgctaagagatattttttataatatataatttgttcattaaatttatgcatatattttatacttattgattatttgagttttgagaatttccaccactatctgaaccaccagtagtatcttgtggagttggtgctggtgttggattactattatttggcttttcttgattttgagaagaactgttattattgtcagacttattactatctgattttttatcattatttttagaactatatttattatttttactacttccactataagaagatttccttgcatctgattcaactctatacctatcttctccagccgtatcttttgcctttttctttctttgttcctctgcttcgttttgttctttttctaatttagttaactcttctttctttttagttgcctcttctttaataacagaggaaccatttttgattttctctataagtttaagttccttgattgcaccctcataattttttaattcttcaaactccgtcatatttgacattctcatagcttgcatatacatagctcttgcattctcattagtactatcttcttccagtgcagaggataatgattccatagcttttttatagttatgtttttctaaatatgtttttccttgctctactaaatttatttcatcttttttattaaatgaacatcctacaagaaatatagataatatcgatattaataaaattactcttcctctcattaaatccctccttgtcatatactttaaattttatcataattataaagtttttaaaatattttatatttattacaagaaatttgttagtaaaacaaaaaataagcagatatgctacgaacgatacaataaaccaaaaattaatttagagatacatatcctagcaaatctgctcataataaactttaatatttaatttttattatatacttttccattttatatctctaaagctaataagtcctcatagctttgtctcttacaaattatcttatcatttccatcaaatactgatactactgctgctcttggtattttattataatttgaagacattgaatatccatatgcaccagttgatgttgttataagtatatctccacttttaatatccattatgtttatatctccaattaatatatctccactctcacaacattttccagctattgttacatgattcatagcctcatgattaattttattcacaatactacactcataactagcttggtacaacgaaggtcttacattatctgtcatacctccatctacacttacataaaccctaacatcttttatatcttttatagaacctactgtatacaatgtacttcctgcatttgcaactattgatcttcctggttctattaccaatgtaggtacttctattccaagctctttacatgaagtttctgctttagtgattatggtttcacaaaactcttttatagttttaggtttatctccttcgctataataaacgccaactcctccacctaagtcaatttctgttagttgtatgttgaatttttcttttatttcttttaccaagttcatcattatatccactgtatctatgtatggttctacatcaaatatttgtgaacctatatgagcgtgaagacctacaagtttaatatttttatattcacttaatttttctattgctctaaataaatctccatttactaaagcaaatccaaatttagaatctatctgtccagtttttatataatcatgtgtatgagcttctataccaggagttattctaaagtatatctcttgagttttacctttatcttcacataatgcttcaagcaaatctaattcataaaaattatccactacaaatttacctacacctaaatctaatcccatgtttatttcttctttagtcttattgtttccatgaaagaaaactttttccataggaaaatttgatttataagctgtatataactcgcctcctgaaactacatctaaacacatttgttcttcatttataagattacacatgtaaagaggtaaaaaagctttccctgcataagcaaccttattttttccctctctagccttaaaatattctatatattctctacaattttgtctaactaaagcttcatcaaatacataaagtggagtttgatattttttactaagttctaaacaactcactcctccaatatataattcatcattatttacagtcatagttccatgaagtttcataatagcctccccaaattttatatattaaatacttctgctattttttctatagctacttgcttatcatcagaatttatagcacaagttatacgaatctctgatgtagttataagttttatcattataccattttcattgaatatcttaaatactttagcagcaactccagaagtatttttcataccaagacctactaaagaaaatttagtgatattattatcaatcactacatgttcttcatctgtatatttagatactatctttttacattctcccaactcttcttttggaactgtaaatgatacacttatcttatctaaaataggtgcagtttggcttatcatatctacacttatacctatagttgctatatcttcaaataagctagatatattttcagctttaaaatcttttattgttatagaactgtcatcatcactagtagctaatcctgttattactttatcctctaatttcatgtcttttccccctcttatatatgttcctttttctgtaccacatgtacgtccgacatagatttcaacaccatatttttgtgcaagctctatacttcttgaatgcattacttgtgctcctaaactcgctaactcaagcatttcttcatattcaatctcatcaagtttactagcctttgaatattttcttgggtctgtaaaataaattccatcaacatctgtatatatctcacattttccatttaatttaaccgcaagagctacagcagacgtatctgaaccacctcttccaagagtggttacatcaccatcttcgttgattccctgaaatccagttactatcacgacatttccttcatctaaactatttttaattctgtttacgtttatatcatcaatttgagactttccatgaagaccactcgtttttatatttaactgataagcattataacttatagctttacatccaagtgcatttaatgctattgataataaagatgctgaaatcatttcaccagtagacattaaagcatctaattccctcttactaggttcattactcaattcctttgctaaagttatatattcatcagtggattttcccatggcagacacaactattaccatttgtggattttcttttcttcgttctattatattttctgctattgattttattttttcagtatctgctactgaacttccaccatatttttgaacaattatactcatgctttctccccctcaagctaaattttgataaataaaaacgcccaaaggtatactttggacgtgtaaatttcatagaccaagtaaccttgtagctcaccactttaaaagtgacagccttatgcatattctgcataagtccagaaaatttgtccgtcaacaaaatttcttcggctatataccctttcatcaattatcaatgcttaccagctcctattgaatactattgaatacagctacctctaccctaggctcattatttttaattaatttattaatatagttttatcatattctatataatattgcaacaattattttacaaaatgtggcaaatcgatagttttcttttctaaagttagcttatatacaattaaatagtttatttaatcctaaatctataaaatttatgctatactcattatcatatctctctaaatcatttaattcggatagattatctggtgtaactaccaaaacgtttggtactttaaaaaatggaattgtagatttatctatttttttagaaagattttcgtatttagaaatgtctatttcattatttaagtcaacatcaactaaaacttgctttatattaccaaattggtctgtatattcaataaataaatcgtatttcacatcatctacactaacatttcggtaaaatctttttacatcacaacctgcagtattgattctaacaactaattctgatcctactagagcctttattaaatcatctcccttaaaaagtttactaccgtttaaataatatacataagagaggtctttataattataataatccacatcacaaggatatttttttagtgtatattcactacacatttttctcaaagtttttttaaaattttttttattgtatcttttttggtctccataaatttttctaaattgagactctgtaacacatctaaccctgctaattaaaagtaatatctctttttccatattcgtcatagtacattctccttgaagtattatttgcaaagttgtactaatattatattaattttatgacattaaatttacaaagaattaaaataaaatagctaatttttatagaattaaattctataaaaattagctatcactatgttaaatactattatcaatctttttatttaaattatacattaccttgattttcagaatctttggaatctgtattttcatcagttcctgttttttcttttgcttttttatcttcaaagtttgcaatatttaggttatcaaattctgacatttctattacaccagattcttcttttgaatacgatattttgactttatcaccaacctgagtcaatggcaattcgctagatacttttgaagtagccctaaatattatatctttatttgaatctaaagttacataataattagtgttaccacctcgcacatctgggcttattcttgtcactgtgccttctaatacctcatcttttaaatcattatcaagttttaaatcattacccttagattctaatgcatccttatagtttcttaatgcttcattcttatcttcacctattccaagtacattataatcttcaacagatacaaatgcaactctcttaacaagaccagccttatcttttaatgatgatacatatgttggctgacccaatatattatacattacagggaacgtcgcttcataatttttttcttgaacattaccttcagctgatttcattgcagccgtttcagtagctcctggttgtttatataatctagcttcttttgttctagaatcaactaacataaatccaattgtagattcatctccacctgaagatgttatacctgtataccaataagacctgttatcattgccataaactaatgatgtaccttctgttggtactaaaactcccttttctgatataacagagtttaaaaatccattaacataaacaccccagtctttaatctggtctgttacaaagctttgtggttgtattctatccacccatttaggtgtgtttttaacatcataaacatttatttttccagtttctgcatcaacagtggctattcctgttgcatttgctcctccatagccaattttatgttcatataaacttacaacccaataaggtcttccttcatcatttatttcaagagtgaaatctgtcataccaacatttacaataccatgtatgtataaatgtctttgtaaatcctgatgtaagtaggcttctggttggtaaactatctttattggctttccatctatttcttgaactaattggacgtcttgaggattactagctgatacttttacataaccacttgtaccacttagagatgttatccatttaattatgtctctgtgaacaagaggcgctacccagtacaactctccatctacattttgtatatgaaattttcctaatttggatacactccctattgcaggaacttctccaagctttttgtcacctaatttcattgccatatcttcatctacaagacgaatgtcatttacactgacagggctaatgtcatcagtaaatttactttcagttacttttcccaatagttctctatatgattttgcatgaagtacaggtgtagaagttataaagggaactactacaatatacacaagcaaagctattgctattgaaaaattatatttagccattttagatgctctttcatttctatctaacatcatatctagtattcctgctacaacaaagaaaattattcctactgaaaataaagatgtaaaatctaatcttagtacaggtaatttaataaatgcataaattattacaattattaatgcaactccatatgttttaagatatcgtttcatttaatactcctctctaaaaaatgttattattattattatatccatatatttacaaaaaataaatatttatcatatttattatatattaagatatctttatatatttatagttctgcttattcaactatatttaacattatacgtgtatgtataaatactttttatacactgtttgtgctatccatcccgcacctaaaggagtgggatttttgcactattctgtattatatatatccaaaaatattataaaaatacaaatattagcagaaatttaaaaactgaagaaagtattctaactaagatttacaaattcttaatcctatcgaagttaaactactatcttcagcctaattatctagcaatatttttttatatgaaaaactctaaatcaagtttttaaatgtttgcgatttttgatacataagaatgttgtctagaattatattctgataataaaccttcatactctaaggttaagccagataaattataaaaatcatttggcgttacttcaaatgcttgtttatttaaaatgtctatctcacttttttctaacatgtcagcaacaaagtttgaacatacatatttatattcagattgtctctgaatattcattagtaaatatattaatgccattgtatcgtaatagtaatcttctctataatcactaattaattttatatttttatatagattttcatattgtaaattatctacttctaacgaatataccctacacacagtgttttttcttatagcatacaatccttgatttatattttcttcaacaaatcctccaataaatggattccttggatttagccttccaaaagaatacattggttttagattttcatttaatgatattgacacatgtgtatacagctttttacttatattccttattaagtaagataatatagttcctgtatatgttgttacaatatagactttattcatcatttccccccaatctagtaactaaatgatattatacacttacaatttaatatcataagatattctaacataataaatgtggttttacaaattttgattttaaggtactttaatattatataatataataaaaatataaatataagttttctatatttttaaccaacagatgttttcttcaaattaatcagatgatttagtatatcttgaacctttccagagtcctttaaatatcctaatgccccatttatttgtgattttaaatctatttctacttccatatccaaatcaacatttcctttttttatagatatatttttaagtgttattgggtaaagataacttttttccaaagtaatcttatttccattaacctcaaatggaacttttttattgtagttacttaatattttttctagcattttatcacttagtttaaattttccaattttcacattctcaagacttacaactaagtttccatcctttaaagtaggtctcaattcaagttcatattgactatttaccaaaccaaataccttatatggtcctgctacctttattttaccatttttcatttcaacaaaattattttcaagttcattaattccatgcttctgcatcaatgtatatattaaatttttaaactcttcctctgaaacagatatttttccaaccattctaagtggattttttactacctccatagaatttatatatgagccttttgataaatattcttcatctatgattttattattttgtgaactaacatcatatctttcttttggtgtcaagatatatacaacaattcctgcaagtactaaaacaataacaattaaacttaacaaaatctttgcaacctttcccataatcgtctcctttacaaatctgtcatcagatttaaaataaatttagataactaacttcacataatattcttaacaatatacatactataatacagtcttttaaaaattaattcaaccaatctaatgttttgtaaataaactgtaaaaacatgtttttagtataaaagttaatattttgcataatactcttaattacacctttatttttttctaatcttggattaaaattaatattatgcaatacagtgtagtgttctgtattataatcaaattaaataggaggtatagaatatgtcaaatgaaacgaactcatctaactttataaagaatattattataaacgacttagaaacaggaaaacatgacagtatcataactcgttttccacctgagccaaacggatatttacatattggtcatgcaaaaagtatatgtcttaattttggattagctaaggagtttaatggaaaagctaatttaagatttgatgatacaaacccattaaaagaggatgttgaatatgtagagtccataaaagaagatgtaaagtggttaggatttgattggaacgagttaaattttgcatctaactactttgatgaaatgtataagagagctttaatactaataaaaaagggtaaagcttatgtatgtgatttgacacaagaggaaatgagagaatatcgtggtactctaactgaaccaggaaaagaaagtcctcatagaaacagaactattgaagaaaaccttgatttatttgaaagaatgaaaaatggtgaatttaaagatggtgaaaaaacattaagagccaaaatagatatgtcttctccaaatataaaccttagagacccaattatatatagaatatctcattcaacacaccataatacaggagataaatggtgcatatatcctatgtatgcttttgctcatccaattgaagatgcaattgaaggaataactcactctatatgtactttagagtttgaagaccaaagacctctttatgattggtttgttaaagaatgtgagatggaaaatatacctagacaaatagaatttgctagacttaatataaataatactgtcatgagtaaaaggaaattaaaacaacttgtagatgagggtattgttgatggttgggatgaccctcgtgttcctacaatatccggaatcagacgtaagggatatactgcagaagcattgcgcaatttctgtagtgaaataggggtatcaaaagttaactctacggtagatagtcaaatgcttgattatttcctaagagaaaacttacaaccaaaggctcctcttactatgggagttttaagacctttaaaacttattataactaattacccagaagataagattgagatgcttgaaatagagaataatgctaaagatgaatctcaaggaaagagattagttcctttctctagagaattgtatatagaacaagatgattttatggaagaacctgttaagaaatattttagatttttcccaggaaatgaagtccgtttaaaaggtgcttattttgtaaaatgtactgatgtaattaaggatgaaaatggaaatgtagttgaaatacatggtacttatgaccctgaaactaagagtggctctggctttacaggacgtaaggtaaaatctacaatacattgggttgatgctaaatcagctataccatgtgaatttagattatttgaaccattaattcttgatgatatacctgaaaatgaaggtaaacatttcttagaacaaataaatcctaattcattggaaatattacaaggttttgttgaacctacacagataaaagattctaaaccttttgataaattccaatttgttagaaatggattctttagtatagataataaatatacaactgacgaaaaatttgtatttaatagaatagttcctctaaaaagttcttttaaaccaggtaaataatcttacaatcaaaaaatgaagacttaaaatataaattacttctactataaataaacttagttagaagtaattttttatttgagtcttcatcatttactttaaatgattaacttttttcactacagattcccataacttctattccatcttttatgcattctatgttaagaggaaaatctggtcctttttctccgtcaatatctgttataagtgaatcttcacattctatatgcacctttttagttttaaagtatagtatttcatttccattatattgatctaaataatcacctctaagcacacttatcaaaactggtattgattttggtattggcattcctttaaaaataattacatccaaatatccatcatctatttcagccttatatgctagatttatatttcctgctgttttgccattaaaaatcaacataagatacatatctccatcataatacatttcctcagaagatacttttatcttaaatttcctcatatacaatgcttcttctattccctttatataataagaaattcttccaaatgaattttttaagtctgtgtttatcctttgtgatacatctgtaaacataccagcacttgcaacatttataaagtacttattattgactttccctatgtctattttctttggttttgaatttatgatttcatttatagcttcttttatatcaaatgaaatttgaagagcatttgaaaaatcatttgcagttcctgtaggcaaaattccaattggaatttttatgtctaattctttcattgcatttactactaaatctacagtaccatctccaccagctatcaatatgtgttcataagaactatcaacttccttaaatgcattctttacaggttctttaatagttaatctatagggtatcaataaataatttttttcttgatataattctatgatagtgtctaaatttgataatatctttttttcacctgaattaggattgtatataagttttacttttttcattatttctccttactcattttattcttttagtatccaaaatcttcatttaaaaaaatcacatgtattctttctggtgttaattgtctttttataagtgtataactacagcatattcttcctggacttgaacagtctatacatataccagtagtcttacatccagtatttgtacttaatcttttacaattggctggagcagctattgtttttgttctttttatagcttcatctacatctttaactattttatttactcctgctataactattactttatcaggtccatatatcatagcagcaactctattcccattcccatctaaattgtaaagttctccatcctctgttatcgcattagtacttgtaaaataagcatctgcagaaaatgactttctatatatttctttcatttcttctggtttgatatcttttgcatatctatcaagaaaattatatttttctcttataaaatcaatcactcctgtttcaaataaggtcatagaacctccacatcctactagagaacctactttaactatttcttcaatttttttaagaagctcttctttgttacttactaaataccctttcatattattgttttccagagattttattgttttttctattcttttttcattaagccaatttaaattttgatccattttaacttcccccttatttttaatatgtacttaattatttataaactttattgtctttataagtttattttagtacatctaaaaaaaaatacaatataaaacttaaatagttttatataattttttccaaaataacttactcaatcaaaaaaggaaagtagatgtactattctactttccctatattgtatgtagtatttattgcctaaaatctatatattaattatatgtttcatattatataatatcacagttaattaaaatgtaatactatcttctttttaaacatataaattgtattattaaatttaatatatccaacttcaataaatcttattaatttgatgaagaagatgctatagctgcacttgttgctgccattacacatgcaatttgaatagcaacaacaatatttaaaaatatattattagttatagagcctatattattctcatttcgtatcaaatctgcataaattgaagctacaatagcagaactaatcattactctattactttttcctaaagaccaatttccaaagcctttttcttctttaagtttatttgaaacattttttatctcttctattatttcatcttctctataatctaataatgaaattgctcctattattggatatccataataattcattttacaatcattttctttaaatgcttttttaagttcaatagtctttttacatttaagcatagttctatcatcactaaataaaagaatttgggataatgcttgtaaatcatttcctttataaaaaccattttcatttagaaattcataacatttttctatgtattctaaatcttcatctaaattttttgaatgaattgcaataagtgctatattacaatagtcatcactagaagttagaaatggatgttttttcctcatgtaatcatatattattttcatttttgatatacatgtaagataatccattttctctctattttcataaactattgatgctgtaagtggtaaatatgtatcgccccaaaacttttcacttttaagttctttgtatatatctaaaatcatcttaaaactactttctggatttgattcaaacgaaagtagtgttgccatataaaacatattatatcctctaaaattagagaataatccagtattttttttaataagctctattcgttcttccactaatctaggacttattctcttgttcttaagagtaaatgcaagtgcacaactatgttgtatcaatcccatttgccaagaacctttaacttcatttaatgctttgtaattttctattaataagtttacttttccatttataaacgattgttccatattgccctcctagtaatatatctcattgtactaatagttttatatttattatatatatattaaatactacaatcaatacatattacttcaaagaacatcattcttcaacaataatgtagccttttttgtaatgtcttcccatattattgactctatcatagtactctgattcactttcattactccatttgggcacaaatacatctattgcattagaattactaaaatacttactagaccccctatccataacagtttttaattttccatctacaataatcttagttccaaaactcaagtgattgtttgctacaaaaccatcttctaaatcatctcctgtagcagttatcgctccatatccattttcttgattaagacttgtgtaataactaacttcaaaagttataggtactaacttctttattttaatacctaactgattttgtagtttctccttttgtactttcaacttatactcatcactatttttataatcttccataccttgattatacttggaattaaagcttttacctgactttactatagtatctatatttactatagattctttacaatgatctgcatctatttttgtttctccatttaccaataatggagttaaacatacactacatacaacacatgtaatcaatgcttctttaagcttcataaattccccccttattattttgatatattagcatatttaatattatatgtctatatttagatttaaataccacacccatttgctttaagaagttgtcttatatttaattcaccttaaacacttataaatcctctatcttagaatcatatagaataaagcttttatcgttaaatattttttattaatcttttaaaatctaaagctactttatttaattttctcttttttagaatttaagaattaaaattctataattttaaaacatattgaatttatttttttgagatgatataattttcttaagaggtggttgatatgataaaaaatacaaaacaaattacagtagaagttaatgaaattttattacaagaaatatctaagataactaatgacgaaaataatattttgacagatttgataaatgaatcaattgtaaattatattcttgaaaacaaaaaacataacattgaaaataaagatttagaagaagtgattaaattttacaaaaaagaaaatactgaaaaacctaaaagtgcagcaagagctatagctgaagcaaaaactcataccctgtattaatcaaataaaaaagttcctaaaaactaggaacttttttatattaataattattaatatatctcaatatttatctcaaatttatcaatataagcatgtttaatacaatctattgtatacttatcttaccctagaaataatcaaaacaaaaattatgccctttatatctaacaattaatttacatgattaatatacaaaaattctgacttttaaattcgtatacaatatcaaactaaaataatactaatgacaaacccaatataaattaaattcaaacaggtttgattttacatcaaacttattgtattaatattaaataacaagacaaaatatttataaaaattacaaattttacataaaactttatattttattcatttaactaattattgtaaaaactatttattttatgataattaactacaccaaattattcatcttttttaatatctttaacccatttttcaacagagttcaattcttcttcatttaccccctttttgaacaaggatttcataaaactctcaatagaacttccatgcatattatctaaaaaagtttttgtttcaaaatgtaaatactcttcttctccaataagaactgtataatgtgtatgtctatcaatctttcttgcacttaagaattgcttatttactaatcttgataaaagtgttagtgttgtagtttgcttccaattatatagtttttccatagcttcaatgacatcttttgatgctactgtaaaatctgaactccaaataaatttcatgacttttaattctgctggtggtatcttagtaatagtcatatgattttacactcctctcaaacttctacataattaaatactatattaatagacttttcgagtcaaaggttttatttaaaatatctcatccaaatttattaatacaaaaaatttatatttttattcaaaattaaacacacaatctattaatataaagataaatatctattctataagtataacagattatcaaattaaaattctaatatttgacataatatatacattttttaaataaatatatacaatgtattaaaatgtatgcaactctatttcaaaattattttgtgatatatatatgttataataaatgtataaaattttgattggtgggttatatatgaatgcatttattagaaaaagaaataaaaactatgttgtttacctggaatttgaagatgaaaagacaggtaaaagaaaacaaaaaaatatgggtacttttgataaaaaaagggaagcaagtaaaagactaaatgaggtaaaagaaagcttatataatgatggttttttagtaccaagcgaaattacagtgtcagaatttctattagattttctaaataaatatagtgaaaatatatctttagctacatataataattatgttagtatttgtaaaaattacattaatccatctattggaaaatataaaatacaagacttacatccggttcacatacaaaactacatagataaactatcttataaactaaatcctcaatcaattaagattcatataaatatattgaaacttgcaataaaaagagcttatagactcaaattaataaaagaaaatgttatggatagtatagaggctccaagatataaaaaatttaaaaatgagatttatgatagagaacaaatgataaaattattagatttagcaaaaaatacagaaatggaattacctattaatttggctattggattaggtcttagaatttcagaagttttaggtctaacttgggataatattgattttgaagaaaatacaataacagtaaataagataacttcccgaattaatggttctgttattctcaaagagccaaagacagaaagctctgttagaaaaatatcttctcccaaagaattaatgtctttattaaaagaatataaaataaaacagaataaaaatttattaaaatcttccattagaaataataataatttgttgtttttcaataagaaatgtgaacctattgctgaagatgttatgagtaaaaaatttaaaagatttttagaaaagaatgaattacctcatattagattccatgatttaagacactcacatgttactttacttataaattctaaagtacctataaaggttatatccgagagagtaggacactcaaatataagtactactctaagcgtttattctcatgtacttaaagaaatggataaagaggcttctgacaaaatttctgaaagtttatttaatgctaattaatattaatttatcttagctttaaattagcttagcttattgagatagattcattaatattaaatgtatctatctcaaattaataactacttaaataatctgttttattttaatttatcgcctcagttattatacttttttatgaaaaattatactttacaataaaaaagatatttccttatagaaagtatctttttaaatactattttattatatacttgctaacattggaatatctaacatcttcttcattacatcatctactttttttgctttatattcattgtatccaattaaatatcctttttcatatgaactttttaaaatctctttttcatataaattatcagatttggcttctgtgacacttaaattataaagccctttacacccatcttcataacctttattataccctttttctgcaaaatagtttttatgatttttttcgttatgtactgaagatattgttactccagaattttcttttgtactagcataaggacaaaaacctttatttggttgatgtgctgaatgtcctccacaataataacgtgttaactctgatttatttttattatgatgacctcctgatgaattatgccctcctgagtgagcatatgaaaaattccctacactaatcatagctaaactcaatactacagctactaaccttttcttaaccataatctattccccccaaaatgttatatatttttattatatcatctactatattatatttaaattcttaatatacaaaatattactcgattctgctaataaacatatttaaacaacataaaaaacctcctaatatttgattaaaaatttacacactcatgcatagcatgtatcaaatattaaaaggttttatactaataattatttatcttttccatacattttagctaattggtcttgtatctctttactttctaaatactcatcaaagtccatttttctatccattattccatttggagttatctctataattctatttgctatagtagatataaattcatggtcatgagaagtaaataaaagcactcctgggaacttttcaagtcctttatttacagaagttatactttctaggtctaagtggttagtagggtcatctaatacaagtacatttgcatttgaaagcattagcttactaagcatacatctaaccttttctcctccagatataacttgagcttcttttaatgcttcttcacctgagaataacattctacctaaaaatcctcttataaaactttcacttttttcttcagagaactgtctaagccagtcaaccaaagaatattctactccgtcaaaaaacttattatgattttttggaagataatcttgagaagtagttactccccatttatactctccactgtctggttcaagttctcccataactatgttgaaaagtgcagtagtagctatttcatctcccataaatactactttatcatctctatccaatctaaatgacacattatcaagaaccttaaccccatctatagttttagttaaattgtgtacttctaaaacttcattcccaatttctcttgcaggtgtaaatcctacatatggatatcttcttcttgatggttgtatatcttcaacttctaatttctctaactgtttctttcttgatgttgcttgtttagcctttgaagcattagaactaaatctagctataaattcctttaattgagctatcttttcttcagtctttttattttggtccttagccagttgtaaagccaattgacttgactcataccagaaatcatagtttccaacgtacatttgtattttaccaaaatctacgtcaactatattagtacatatttgatttaggaaatgtctatcatgtgatactattataactatagactcttctaaatccattataaaattatttaaccagtttattgatttaaaatctaagtggtttgtaggttcgtccattaatagtatttcaggcttaccaaaaagtgattgtgctaacaataccttaaccttttccccaccaactagttccttcatttgtttgtaatgcatatctttcgttatgccaagacccataagtattttctcagcattagtttctgcatcccatccgtcaagctctgcaaactcaccttcaagttcggcagcttttatcccatcttcttcattaaagtcttccttcatatacaatgcatctttttctttcattatgttccaaagtctctcatgacctcttataacaacatttaaaacagtttcttcttcatattcaaagtggtcctgttttaaaactgacattctttctttatcagttatagatatactacctgtattaggctctatttctcctgataatatttttaaaaaagtagattttcccgcaccattagctcctattattccatagcaattacctttagtgaattttaagttaacatctttaaatagttccttatcaccaaatctaagtccaacacctgtaacttgtaacattaatatattttcctttctttttgctcataatttattttatcataaaactttgataacatttttattatatattatcacgtaaatagtatattttttatactaaatttgtgaaatatttattaaaataatactaaaaattgtaaatttataaaaattaacaatctcttatattatacttataaagaaatcaaattgcaactttattcattcttttacacattgaaaataagttattataatttctaaataaatatgcttttcttaaaacatcattctagctgttttgtttcatatttaaaaagagtacttaatttgtaaatactcttttttaataactttatattttagcaaaattacatgcaggataagtacatacatcacagttcatacaaaggccaccatgaccatatctagctatatcatacttatcaagcttttcatcaattaaaaccctagataaaactatatcaaatactgtagttttatgatacattgcgcatcctggtatacccataattggaacttctccataataagcaagtaaaaacatagctcctggtaatattggtgaaccatatgtcactaaatcagctccagtttcttttatagctgttggcgtaacatcatctgggtctacactcatcccgccagtacaacagataagttctgctccttgacttataaattcttttattgcactctttataatttctttatcatctgggcatatagtctgtcctataacttcacaaccaaagccttttactttttcttctattactggtccaaatttatcaacaattctgctataaaacacttcatttcctgtagtaacaattcctactttcttaggtttaaaaggtactacatttactatttttctattaccaactactttttttgcatcttctaattttttctcatctataaccaaaggtatcactcttgttccagctacttttaaacctttatttactataaaattattatgaagagtagccatcattatttctccaacacaattcaaatcaaaaagtgcatcaacatctatctttaatagaccatcacatgctgctataaaatctatttttccttcttttatttcactaaaatctaaattttctccagcagttagttcttttaaaaacaatgcgccttcattttcatgaaccattccttctgacttttcccatacatacaaattatctttaccaagagataataacactggaatatcttcttcttttactatgtgaccctttttaaattttcttcctttaaattctccaggtattatttgagttatgtcgtgacataaaacttgtccaacagcatctatagtttttattagcttcataatttacccccgattctctcatagtccatttttgtatcgatatcaaataacatttctttaggaacttctacatactttatttttgatgaattttttaaaatggttttacctttttcatcttctttaagtgccaacaattcttctttcttactatatgggaatatgactggatttccacacatatctttgtatcttggaattactataaaatctctatctaatttaaaagtatttataattttatctatatataagttatcaataaatggctggtctcctacaaagaacatataaccatcacattttgagctatttaaaactcctaattttatagattcactttgacctatatttgcatttttattatctatatattcaaaaccatatttattacacaataacaaaacctcttcatattgacttactactacaacttgatgaaaatcaatcttgctaacttctctaaatacatgttctattatagaacagcctttataatttaataaaagtttatttgctcccattcttctggcaaagcctgatgccattatcactgcatttatcatatatatcatccttggtatttataatatattgatagttctatgatttttataatatctctattgatattatctatatatataatatcatataaactattttaatacttcaatatcttacacaaaatttttgttttacgcttccataaaatatctctatttcactttcatattctttaatattttctattaattttatagctaaatttttatatttttcattttcaactttattaataaataatactctttttccagaataatttttaaataatccatttggatttaatactatattttttaagttttcaatacttactgtagaactactattaatactacttgtatctaaatttgctatttttttaaatatttctactctatgtatattctcttcattaatattcattccaaatgatgttatatctaatatccctatggtttttgtagttttatgatatactactggttctttagcattccaacctttaagtttttttctctttgagccatctccctctattaaaactaaatcaaattggtctacaatttcatccaaaatagaggaatcaatacttactaatttattttcattatttatataactgccacagactgttattccatgacaaatagatggaataacagttccatctattgtaataattatattgtcataatcgtttggtacatatattttagttgttgttgtaagaagaactttcaatttatctctataaaaatttgcaaaatagtttataaacgaagtttttcctcctgctccaactacagttattatttcattcttttctattatatttgatagttccacactttcacctcttataaccagttttctaatctcttaattattatagttagacctttttagtaaaagtgatttttgaaattccataaactcgaaagtaaatagattctgttgtaaacaacaaggcggatccaattcgccgctaagctgtaagcttacgctatcagtttatcttttaaatataattaagatattcttactctctgtggttgctttaatatttgaggattattctgtaaattagataaattaactacttgtgatttttttagtatattaagactcgcatttacatctgcatttataatgattccaacactggatttgtactgtccacgtgttattctttcccctttaaagtcatattttttaacattgtccacattgatatcaggtagaaaatcatcagcaaaaaaatcagacttactagtatagctttcttcttgcctaataaaattgatattttttattttacatagatattctaattttccttttatctctccaaatgggattcttataaaatttctatatatttttctctccatattatcacttttttctaacttagcattatatcctacaattaaatttccaatattattttttacacaataatcaattatataaaaacaggttttatttacatagtctttaacttgattatttctcttattccaaactttaaattgttttcttgttattgcagttatattcttttttaattttaaggattctattttatcattctgtttgtttgcccactgattcacagattttagcctttttccatctatgataaaactatcacctaaattggtaacacatgtacataaattttctaaacccaagtctatagctagtgcatttttttgatttgaaacttcctctgatttcggtatttcataacaatactgaatttcaaagaacctagctttatgtttaggtattattcttatttctttaatttttttctctagtatattttgtggaacttttatacttactttcccatatagttttttaaatgctggagacataggtacatttaaaatcccatcttctttgattcttatttgacctattattatgctaaaaaatccttctttatctaaatatttaggtgattttatccctctaaagtcatatttcccttctttggctaatttaattaacccaaaaaatgacctaaacgaactgtctacttcttttaatatttgttgcgctatattactattgagaagcttatagttctcattttctttgcatacatgataattagcttcatagttaagatgttctccttgattgaaataatgctgtcttacattatatgtaccaacattatataagttcttagctaagaagcacatctctcgtagagcttgatattcttttttagttaagttttttaattgttgtctctgagttccatagtgtatattttttattctgtttgacatgaactcacctcctttagaatatactctactagacattatatacggtatttttacaaaacaccatatataatgtccatttaattactttattttacaaaataatttaaatttacttgcttttatacaccttattatttattataattgtttattattatttttcatacccatataaactttttcaaaagtcataggaagctctcttaaacgaactcctgtagcattaaatattgcatttgctatagctggcgctggtgtatgtataactatttctcctaatgatttagcaccataaggacctcctgggtcgaaattctcagcaaaatctaccaatatatttccaacttctttttttgtaggaactttatactgtaggaaactatctgttaataatctcccatctttatcaaatatagggtcttcatacattgcaaaccctatacccatcatcacaccaccttctacttgtattctagctaaagttggatttataactgttccacaatcaggtacacatgcaaaatttatgaccttatattcgcctgtatttttatctaattctatctctgcaaatcctgctataaatggttttatttttttcaacatgccaaaagattctgttgcttccaaaactactggtacatcatcactagcaaatcctattcctccaacagattctctacccaattcctctaatagaacaaacttgctattatcgtttttaacaaaaaccctgtcttttcccaactctaaatcttcttttttaaatcctagctttgactctgcaactgaaagtaatatatcttttaatttatttgctgtctttattgttgcatttcctgtaaccgttgttgtacaagaagcaaatgctcctgtatcatagggacataaatctgaatcacctgtataaatagaaattctatctacagtagtatttaaagcttccgcagcaatttgagcttgaattgtatcagccccttgacctaagtcagcaagaccagataatagtttatatgtgccatcttcatccattcttatagtgactgttgccatatctacacgcggtataccagaaccatgatttgctactgccatacctactgctcttactttgttgtttcctatatctttacatggatatttatcatcccaattgattaatttcttgcccttttctatacattgtctcagctcacaacttaatatttcgtcttcagctgcttttccattggtatacctatctattatatttttaattctaaattcaagtgggtccattccaatcttatgtgccaattcatcaatagcactatctattgcaaatattccctgtgtagcaccataccctctaagtgctcctgctggtaacctattagtatatactgttctagcattaaatctaacagcatcaatatcattatatattggtaaggtattgtgtccagattcggaagaaacagagacaccattcccaccataagcacctgtattgtttaatgactttagctctattgcttttaaatttccttctttatctgcaccaactttaacatcaaaaaacatttcatgtctactattagaacctacaaaagtttcacttcttgtaaatacaaattttgctggtctaccagttttcatagtaacaaatgcagtaaatatatctgttgctgctatattctttcctccaaatccaccacctattctaggtttaattactcttatttttgaagatggtatacccaatacttttctaattattctctttacattgtgtggtgattgtaatgatgaaactacaacaattctatcatttatatctttatatgaatatgacctatgagtttccatcatgcaatgcgattgactttgggttttgtatgaagattcagccacaaaatcactttctttaagcttagcttcaacatctccaaattcaaaaaattcttttgatactatattattttttgcatccaatccaaaagggtatggctctactatgtctttttctggatgtataacaacttcatttccttctgcttctcttgcatcaaacacaggctttaaaacctcataatctacctttatcatttttaaggctttaagtgctgttttctcatcttcagcagccactaaagctacttcatctccaataaatctaactgtatcttcaagtaaaactctatcataaggtgatgcttctggttctgtttgacctggcacacaatatctgacctgtggtacatctttatacgtataaatacccacaacccctggaattttttcggcttttgatgtatctatattctttatcttagcatgagcatgtggacttctaagtagttttaatgtcaaaacatctttatgcataatgaggtcttcagtatatagaggttttcctgtgacaattgctgtactatctatctttcttatccccttattaatcattatacattccctcctcaatagcattatacatccttttaactaatgcacttgccatatcctttctgtactctttactagctctcatattacttccataagtaagttccttactagcaacaatagatgccttatctatatctttttctttatttaatatattactcgcttcaagtgctaatctagctttttgaggtcttgccccaattgctattttgtaagtatcattttcttttagcattgctgaatttaatacagaaaaatctcctgtgcattttcttattgagtcaaaaacagctatcgcatctttttttggtagtattacttcgaccaatatatccctacttaattcactatccaaaaactcacttaactctagtattcctttattgtataatctcaccttcgctccaacaaccaaaagcgctggtattaagtcagaaaagccatactttgaaaatacacttgcaccaattctagccccttgtctaaattgaacaccaactatattagaaacagcgcttgaaagtattccactacagtaattttttatagttttatcaatttctaaacttctaagtgaagtatctgcacctatcaaaatatttttttcatcctcttttatataatttagatttatatcttttaaatctatcgctgttcctatatttttattacttaattttataaatccacatccacctaaaataacattattttttttagaaattaaaattttatatgcttcttctaaactctgtggaattgaatattcctttatagtaaccatcttatcccccatcattaacttattaaaacacaaaagtttttaataaatcttttatttatatttataattgtagtatatttaattcacatatattaaacctttacattataaacttttatttttatcctcaaccttatcacttttatttccaggaaattttaccatatataaagcttgaattattatggctaccattgctcctgaaactacacttgaatctgcaagtaatgtctctataaattttggaaatttttcaagaacttgaggagctaccatgaatccaataccagaagccatagaaagacctaatatcatgctattttcttgattaaatccatccatactaacaagtcttaaaccagatgttgtaagagttgaaaatataacgagtgttgctcctccaaccacacagggaggaattgttcttattaaattagctaataaaggcgatattcctgccaaaaataatccaattcctccaatagctagtacaaatttacttacaacctttgtattggaaacgattgcagaattttgtccaaacatccccattggagttgcagaaaataatgcacctattgtagagagtactccatttcctaaaacagcagaagaaagttcttcatctgttacttgtctattaagccctcctaccgcagaaagtgtacaagcacccattatatcagctatctcaactaaatatattattgaaaacattacaacaacttcaagtcttatatctagcccaaaagcaagtggttttggaagcgcaaccaaagtaaactcctgaattgaagaaaaatttactatacccaaaattaatgataaaatgtatccaaaaattatgctaactaatattgatgcatctttaaataatccttttccatacttatttaatcctaatatcataagagatacagatattccaactataaaattaattggattcccaaaagtctcattgcccatacccccagctaagttttttatagctattggaaaaagtccaagacccatacatgcaactattgttcctgatacagctggagtaaatataaatcgtatttttttaagaccaaaaccaattataattattactataccagctattatttgagagccaaataatactggtagtccatacttacttgcaacagataccccagctcctataaacatagctgtagctcccattataactggtattcctcctcctaatttaaaacctttaaacaaaggtattggatataattgtaataaagttgataatcctgcaaaaactaatgcggcttgaatcaataatgttgacatcttatgattaagtccagatgcatttgcaatcaatatcgctggtaaacaactacctattaccattgccattaagtgttgtaaccctaaaggtattgcttcctttagtggtggtattccgtctaattcaaattttgatgtactttttgctttcataataaaaactcccgttacataaaacttattgaattatataaatacttaaaaatctaatatattaaattaatgatgttcataaatatcaactatactccaacatatatttaagtttttagtcttaaaaaacagatgcaataaatttaattattaacaaatacacgtattctttaattttgtatacattatataccatgctttacaaatataagagtattatagctatgaatttttaattttttatagtaaatttaattcaatttaaatctttcaatcttaatcattataagttataagttttcataagtatttacatgtttcaagttttaaacatttacctataaacgctactttatagatgtcacttcaaatctagtgacctcatactttcatatgagcgtagactatttcttcatcttcagcattacctgctaagagcaacccgtttccactatcaatcgcttatagtgtactctctctcgagatagtcgtttgaccttcctatttctaggcttggcgaccaaatgtccatttttaagtacttaggctctcaccatataccatcctcactattgtttctggttttcaccacattcataaaagtttctttctatcttttattgtagttgcaaggctttaggatttactggttttaaagttgtgtcctacatagatttctctatgtacggggccaaaagtacaatttatttaacatactttgctttaccccctgtaaataatattatttactctttcactgtttttgttattaaattaattaaatatcaattaatctaagcataaaataattatttaatttaaactcaaaatatttatgaatattttataatataattctcataagacagaaaaacttaataagctatgtatctcagttgtaccaatgtactctcctttactatatttgtatctgcaacataaaatatacaagtttctatctatttatagatatatatatctataagcaaaatagtaatattatttttatagtaaaaattttattcatattactatttataatttttatagagcaattttagtgccaatatttgcatacatttgtatagtataaaatttttatgttctcattgataaaattttacttatttcaagcgttttattcgattttatcatctaaattttaggttttatttttataaattaattgtatttacataaaaaaaaagacctaaaaacaaatttttaacggtcttttctcaattttttattttcatttctaaaatttataataaatagtaagaacactataaattcttttatataaaattcttagtttgtggatgataaattagtgaattaaaatactactttactgattttagtttgacaatatcactccaatttttactagtggctaactctactaaatttaagtctcttcttatttcagctatatcctcttttatagaattagtgtcaccttttatatatgctatgttatgttctatattatcatgagtagctttatttatttcagaattatgtaataaacttcctaaaatattattctgttctatctgtatctctttcattgatttatcttcacattctagactatcaatcttaatttcaattccatataatttttcatttgctatggatacctcgtccttaattccattcatatcttcattaatgttatttattttattttgcataaagtttacttctgatttaacttcggaaacatcttctttcattacagttatttcttgtcttacttctgacatgtcttttttcattacatttatctcttgttttacctctgatgtatcttctttcattacagtcatttcttgtcttacttcagacatatcttctttcattatatttatctcttgtcttacttcggacatatcttcttttaatacatttatctcctgttttacttccgacatatcttctttcattacagtcatttcttgtcttacttcggatatatcctctttcattatatttatctcttgtcttacctctgacatatcttctttcattacagtcatttcctgttttacttccgacatatcttctttcattacagtcatttcctgttttacttccgacatatcttctttcattacaatcatttcctgttttacttccgacatatcttcttttaatacatttatttcctgttttacttccgacatatcttctttcattacagtcatttcttgttttacttccgacatatctccttttaatacatttatctcctgttttacttccgacatatcttctttcattacagtcatttcttgttttacttctgatatatcttctttcattacagtcatttcttgttttacttccgacatatcattttttatgctaactacatcttcatttatagtatataataactctaaaatcttctcttgcacttgcatcaccatccctattaattattataacattttacacaaatgctatacaatgttaacatatatatcagaattattaaaattttaattaaacaaaattgattcactttattacttcaaaactaattaatatctaaaataactacaaataaacaaaaataaggtcaacaacaaaaaaggcttatctctttgagatagcctttcttatttttatttaaaactttgttttttataaaataatctatacattcagctctgaacatgaaatttttcttccaagtgcttttggtttacaaactgatatacaaagtccacaatatctacactcttcttcattcaattccatcttatcattcaattttctcgcttgatatgcacaaactctctcgcacatcttacatttagtacatttttcttcatcataagtaaactcaaagctaagtctttcattaacatctcccatatgattatgtactataccacaagcattttctatagtattatatcctaatctattaagattagattttaaatcatcatgtattttagatattacttgtgcgccttttaaaattactactgaacatataccaacaaagtcagcacctgccataatcatttctaaggcatcatctccacttacacatccacctaagccaattattggtatattaacttgtttttttatttcatatattctctgtaaagttattggcttaatagtttctccacttaaatatcctattccatttccacctaataaaggttgccctgtttctatgtctattctaaatgctggtcctacagagtcacaagcagttattgcatctgctcctgcttcttctaattttttagcaaaatcgcctatctcatctatcataggaggaagtttaactattacaggtatatttactctttcctttgcatctttaagcattggtatcaaatctctatagtcataagatactaattcaataaagtcagctcctgcatttgcaactttctctactaattcgctactttcttcaattgtatgacctactgaagctatacagacagtcccatctcttttcatttgtggtatttcaaaatctatccattgctctggctcaaaatctgtccatttttcattatttaaaagagcattagctgtatttctaaccatatgtggtgctggatttatagctctttcttttcttatagtcttagtcacaactgcccctgctcctgcatcacttaatatcttgcatccagctgcactatatgttaatggtcctgaacctattataagtggtgattttaattctttacctaaaaaattatacattatctgcttccccttttcatatatatttacattcgttaaaatttccaaaattcacaagcaacttctttcatttctttaacaatagcttttttatctaaatcaactaactgtttttcttttaaaatatgtctaccatctatgtatacatttgatataaattcttttttaccctgaactactatctggtcaaatatattatcaagagtcacaggagttttaaattcatcttccataactattatatcagccttattaccaactgctattttaccagaattttgaagtcctaatacataagcaccatgctctgttgccatcctaaatactaaatttgctggcattactgatgcatcttcttcaactgatttatgcattaaaaatgcacctctcataacttcaaaaaaatcatttatatatccatcagtacccagtgccacttttatgccttttttaatcatttttggtactggagaaaaacctccacctacttcacagttgctaagaggcatatgaaccacttttacacctttttcttttaatatatctatttcttcatcatttacttttacacactgagatgctaatacagtttcatccaatatatctaaatcattatagtagtcaactgcttttttgccaaaatgtttttcagcatagtttggctcatatatactctcacataaatgaaattgcattggtgcatttaatttttttgcatcttctttagctttcttaataaatctatcagaacatgtgaagcttgtatgtgtacacattattccatttattaatttactattttctctactccactttattaaattagaattttcatctaaacatctaagtccattttcaaagcttattctttcacaactttctaaggataaaatcgctttcatgcctatttcttctagtatttttccttgctcaattaaagttccttcttctgtatttggagcttctagggtatcacaaaaagctaccacaccagattctataagttctattgctgatgctttagttgttgccttcacttctttcaatccaattctattttctataaatggccaccaatagtcatttaaaaaaccttcaaagtcagtaaaatgtacatttgccggtattcccctagaaagaactccatattgatgcatatgaccattgacgaatcctggcattattatagcatctgatttatctattatttcttcaatatttttatattttatttcaacttcttcatttggcaatatatcttttataatgtcattttctactacagcagcagaatttgtatatatttcatcagcagaagatattaagtatttacttttaatagcaatcatttatttacctccctgatttaattttttcatggccatataaactttctcagaagttataggaagttctcttatacgaactcctgtggcattgtatattgcatttgctattgctggtgcaggtgtatgaataactatttctcctaaagatttagctccatatggacctgttggctcataattatctacaaaatcaacaattatgtttcctatatctttttttgttggaactttgtattgtaatagattagaagtttgaagctttccatcagaaccatgtctagggtcttcatacattgcaagccctataccttgagttacaccaccttcaacttgtattctagcaagtgcaggattcataactgtaccacaatctgtagaacaagcataatttattactttaaactcccctgttgttttatctaactctatttcagcaaatcctgctaagaatggtttagcactctcttgtataccataagattcagatgaatataaaacttcttgatttccaccaccaacagattcttttcctaattcacttaacaaaacaaacttctctacatcttcactataacaaactctgtcttcatatagtattaaatcatctattggtaaatcgagtttcttctgtgctacttttaatatcttttgttttaaactttcagcagattttattgtagcatttccagttacataagtagtacaagaagcgtatgcaccagtatcatatggacacatatctgtatctcctgtataaacggaaattctatcaatagatgtattcaatgcttttgcagctatttgtgcaagtattgtgtcagaaccagttcctaagtctgaagacccagaaaacaacttataagttccatcttcatccatcctcatatttactattgccatgtctatgttggctataccagaaccatgagttcccacagacattccaacagccctcaccttattgtttccaatatccctaacagggtacttttcatcccatccaataagttttttacctctaattatacattcatcaagtgcacaacttcttattggaaaattcattattccgccttcagtttgtttttttataatattctttaactttatttctgttgggtccatattaagtttatgcgctaattcatcaattgcacaatcaagtgcaaatgtaccttgtgttgctccatatcctcttaatgctcctcctggaactaaattagtatatacagttctcccatcaaattttattgcaggtacattattatatgttggaagtacattatgacctgattcagagcaaactgaaggtccattatcaccataagcgcctgtattattcaatgctttcatatctatagcttttatgtttccttctttatctgccccaatttttatatcaaaaaacatctgatgtctagtattagtcattgcaaaagtttcttctctagtataaattagttttgctggtctttttgtcatccaagttacaaatgatgcatatatctctgttacagctatgttttttccaccaaaacctccacctattcttggttttattactctaacttttgaaagaggtattcccagtgctttagaaacctgtcttctcatatgataagctgattggtttgcagaagttactactaatctgccattcgtatctatatacgtataagctctatgagtttccatcatacaatgggcttgtgattgagtcatataagaatgttctactattacatcactttctttaaactctttttctacatcccctttacccattttttctctcgatacaatattttttgtagcatccaatccaaaatcaaatggacaaaacaaatcatcttcttcatggattaaaattttatttccttccgattctcttgcatccaatataggagtcattacttcatattcaacttttataagtttcatagctttaatagcagccctttcatcttcagcggctattatagcaacttcatctcctacatatctaactacgtcttcaagtattaattggtcatgaggtgatgcttctggatatgactctccaaccattgaatatctataatttggaacatctttgtaagtgaatatgtttactacaccttttacctttaatgcattttttgtatctatgttttttatcttcgcaaaagcatgcggacttctaagaagcttaattgttaaaacatctttatgaaaaattaaatcttctgtatatattggttttccagtaacaatggcttcactatctatttttcttacctctttatttaccatcacactcacctccaatactattatacattctcactactaaggcttttgccatatcttttctgtattctttacttcctcttatattacttccaaatgaaagttcttcacttgatacttcaccagctttttctatatcattttctaaacttaatatttcacttgctttataggcaatttttgctcttcttggtctagcgcctatcgcaattttataaatacttccttcttttaacattgctccatttaatactgcaaaatcacctgtacattttcttatagaatcaaatacacctatagcatcttttttaggtaatataacttctattaatatatctttttcaagctcactttctaaaaaatcagctaagttcataaccccttttttatataacttaacctttgcatctaccactagtaatgaaggtattaaatctgaaaatccatacttagcaaatacgctagctcctactctggctccacttctaaattgaactcctactatattagaaacagcgtttgaaattaccccattacagtaatttttaataaccttatttaattctaaagttcttaaacttgtgtctgctccaattaatatgctatcatcagtttcatttatataatctaaagctaagtcttttaaatctattgctgagccaatatttttactacctagttttaaaaatccacatcctccaagtattatgttgttttttcttgatattagcagttcataagcttcatctaaactttttggaactacatattcctttatagttatcatactctctccccatatcaacttaattttcacttaaaagtctaagtgtttaaatatttatgtattgctcttaattgacctttatatcctgtacatctacaaaggttaccatttacataatctataacttcttcttctgttggattttgaagctctcttttcattgccaaaaccatcattataaatccaggagcacaaaatccacactggtcagccccttcgtctgcaagaaaatctccaaacttctttgcttcatccaagaccccctcaagtgttgtaatatgctgaccatctactctagcagtaagataattacatgaaagcacggccttgtcatttaccatcactgtacataacccacatgagcctgtatcacacccttttttaacacttacatatccattttctcttaatgtatctgctaaaaaatcatctggtcttatacttaattctttttctttattatttatggtacatttgataatcaaataaatcacctcaaaactcatatttttaagctaaagttttactatacttttctatgaataaattacatttattaataaaggctattccatttatgaccttccattctattttttatagttcctcttacacaaagtctctcagctgtatcttgagcatcttttaatgctttctcttcattagctgtcaatatttttgaatcttccattattatatttccatctactataacactctctatatttttcatactagaagaatatactaatgtagataccggattatgcataggtatcgcttttggtgaaagcattggattaaatattagtaagtctgcttttttacctatctccaatgaacctatctcatcttccattccaatagctcttgctccatctatagttgccaactcaagaactttttctgccgacattgctaatgggtcacacttattaactttatgttgaagtgctgttaatttcataagttcaagcatatcttgagagttattactagcggctccatctactcctaaactaactgttattccttttttaagcatttctggcactggtgcaacacctgaagataagtacatattacttgctgtattatgagacactttcatatcgtattttttagtaagttccatatctttttcagttagatacacacaatgtaccataagcacatttggtccaagtattcctaatttttctaaaacatctatgtcatattgcccatgcaattcttttgctgcttctctatcaaaaggagtctctgatatatgtactgtaaataaagcatcatcatattcttttaccactctccatagcatttcaagcatttcttgagaatttgaccatattgctgcaggagctactcctattttgattcttccattttctgtattatggtgtttttcaaacaatcttcttacatctttttcaaccgtttctacatcttgcattattccaggatgaactccaaattgagctcctgtattcatacatcctcttccaagtattcctcttattcctaattctttataagcatctattattccatcacaaagacctggcttactatgaggatacatgtagtcaaccatggtcgttataccacttctaagtccttcaatacatccaagcattgcagcatcataagtatcttttggctctaaatagttagctgctggaaatgtcatagtttctaaccagtctttaagtaccatatcatctcccaatccttttaataaagtttggaataaatgattatgtgtatttataaaacctgggaataaaactttacctttagcatctataatttttttaacatcagtatatttactttctatctctttagaatttccaatatcagcaatcttgttatcttttactactaatgccccatcaaaaataacttctctctctttattcacagttactattatggcattcttaataagtatatccatcattcttatttccccccgcattatttagtaatttttcttttaatatattgacctgttggatgttctttaacattacaactttgtactacatgatttcctctcaaaaatacatcttcaactttacatttaaccttaaatccttcatatggagtataatctacattttgtttttgagttttataactaattgtttcttctttattgatatttaaaatgactatatctgcatcacttcctacagctatctcaccttttttaggatacattccaaatatttttgcagcattcgtagaagtaacttccacaaacttatttacacttattctattttctaagaccccatatgtatataaaagtgctaacctatgttcaacaccaggtgctccatttggtatcttactaaaatcatcaattcccaagtctttttgccccttaaaattaaatgaacagtggtctgtgccaactgtttgaatatctccactagacaatccttcccaaaggtaatttatgtcttctttttttcttaaaggaggagacattacatacttagcaccctcaaatttattcttattatataaattgtcttctaataatagatactgtgggcatgtttctactatcatatctatatttttttctctagccatttttacagtttcaagtgactccctacaacttaagtggactacataggattttgaattagataatttagttatatcagcaagtcttgaaacagactctttctcaactatgttaggtcttgtaagtggatgatattttggctctaaattaccattttgtatattttcttctatcaatacatctagtaaatccccattttcacaatgaaatccaactatacaacctaaatcccttgctttctttaaaaccctgtatattgttccatcatctactttcatgccatcatatgccatatacatcttaaaagatactatcccatccgaaataagtttttccatatgattaaatgtatctttatttaaacatgtaattgtcatatgaaaaccataatcacaataacaatttccacttgcttttttatgatatgcttctacaccttgcagtaggttttccccctcattggcttctgcaaaatctagtattgtagtagttcctccagctatagctgctcttgttcctgtttcaaaattatctgcagttgtaatagaacctgcattcatatcaaaatgagtatgtgtgtctattccaccaggaattacaattttacctgtagcatcaataaccttatcaccatttatttctaagttatttcctatttcaactatcttttcatcttctatccttaaatcacttatataagtcttatcagaggtaattatagttccacctcttagtattgttcccatatatacctcctaacttttaagctttaaagtattttctaagtatcgtaaaactttatttaaaattgtattttctaaaggtgctatattcagcacctctagactatatttaaataatttattgtgaactaaatattattttccgtatacagattttaatattccatagtaaccttctgttcctataaataactgttcttgctctatatactcatctattgtgtgagcaagattttccttagaaggaccaaatcctatagtttttattccagcttcacctgcatagtgacttccattcgtacagaatgagtattgagttatttctgaatctattccagcttcttttaatcccttatatgctgcttgaacaaattcatcttcttcgtcatataaccaacctgggaagaatctttcactttctatagtatttcctgtatagcaatcagctttttcaaccgcataagaaactttcgcatttaattctgggtcttctttcatcatttcatctaataaagcttgtattggagctaatacgccttctcttgtttctccaactaataatcttctatcaaaagtagctttgcaataatctggcactactgatgcccctggatatggagaagattttatatctgttaaaactaatattccatcacctaaaactggatgagttggaggtactaattgttgtatcttttggattacattagccattttataaactgcatttacacctttttctggattagcagagtgagctggtttaccaaaagtttctactactatttctcctctacctctctgaccaatctttaagtttaactctgaagactcacctattacaacatagtcaggttgaacagccttacttatctctctagccgaaacaccttcaaatatttcttcatgaacaacacctgctacatatagttctccagcaaaatctcgattagtgtctttagcaaaatacgctacagcagacatcattgcagtatattgacctttcatgtcagaagttcctctaccatatatctttccatcaactatttttccttcaaaaggaggaacactccatttacttgcatctggaactggaactgtatctatatgtccatcaaataatattttcttacctggcttgttaccttttatacatcctactatatttccatatctatctcttgaccaactatcaaaacctaatttttcaaaagactcttctattgcttttacaacaccttcttcatttccagaagaactaggattttgaattaatttttggcatatttcagttacttcttgttttctttgttcgtttaacatttcattatccccctagattttttataatgtatgtattttatatacttatatattttctaaattttagaacttatatatcttctaaatatgtaaaccaatatctaataattgcattttagtaattccttatatacttggatattctccatcccaaactatacttctatatttgtcagggtcagtatctccttctgtgcttattaaaagtattcttgaattttcatctaattttaaatcttttcttaaatctgctaaatcttctctttccatagctgctactaaaagaccagttgtaactgctccagattctccagaaattaccttttcatcaccatttaaaggattacctaatgttctcatacctttagcagaaacccagtctggtgctgaaacaaatgctgcagcatgattttttaatacttcaaatcctatagtatttggttctccacaagcaagaccagccattatagttggcatatctcctccaacaaatcttggttttccatctcctgcttctgctgatttatagtagcaatcagcttcatcagcttctactactactgttattgggcattcatcgtatattgaagcaacatatccttgaactgctccagcaagtgaaccaacccctgcttgcacaaatacatgtgttggtctatctactccatattcttttaattgctctatcgcttcttgagccatagttccatatccttgcattatccatgctggaatttcttcatatccatcccatgctgtatcttgaaccattactccatgatcatcagcttctgcataatcattagctaatcttactgcatcatcatagtttaagtctgttatactagcatctgctccttctcctttaattttatttaatctaaactcagaagaaccttttggcattaatacaacagatttttgacctaatttattagctgtccaagcaactcctctaccgtgatttccatctgtagctgtaaagaaagttatttctcctaatttttcttttatttctttcgaagttaatttgtcataccctaactcagatatatctgtatctaatctttgagctaagtatctacccatagaataagaaccacctaatactttaaatgcatttaatccaaatctataagattcatcttttacatatactcctgcaacacctaatttttttgctaaaccttctaggtttgctaatggagtttctttatattgaggaaagcttttgtgaaaatttctaaccttagttatttcttcttcatttaaaaatttgatacaattttccttatcaccctttggcaaattatttactttccatttaatttcttttaacatctaaaatacctccaaattattgttaaatttttatactttaatatataagcaattaacatgccaacactaaatatatactagatatttttctatgactctttagtatagaaattgcaatgcttttattattctttcttttctatctttagttcatacaatgtatgtagaatttaataactaaaaaaccttttctatcttctcactttttaattctcatttttaaaatttaaaaataaatctcaaaacactttgtttctatattttttaatataaaatttataaaatctaaattaaaacataaaatagtgatgcaataatctattacatcactatttgtatatatttaataatataataaatctttagtggtctctaagaggtgatttttcatcttttttaacatctaattcttcttttacgacattccatttttcaagaccaaacttagaaaccataactgcctctgcagcaccttttccaagtctttttactgtgtccatacctgtctcatcctcttgggcaccttttgcttttccatctttactccatattgtaccacctatatagcatccacctaaacctccagatactaacatttcatgcattaggaagaaatttattataggaagttttgtcaattcttggccaccatatctagttccaccagtagttatagctgcaccaaccttattttgaagttttcctggatgaactaaatacattggacgaagtctattaaatactgctgtaagttgagcagttatattcatatcataaactggagaacctactataattccatctgcctccaatattttttgctctaattcttggatatcatcttttataatacacatagtttcttttcttatacatgcatcacaatgtacacaaggacttatttttttccctctaactgaccaatactcagtttctataccaggtatagtttctgcttctttcaaagcttctaacactgcatattctgttgctcctttacgtggacttccacaaatacctaatatctttgccataataatatctcctcaccaaataaatctatttttattatctatttacaaatacaataaattgttgtttgtgctttaatttctactattttaattttattggcaatgaatgtatttctacatcagttgcattatatactgcatttgcaacagctggcgcaactggtacaacagcacattctccaatactcttaccaccaaaaggtccagctttttcataactatttacaaatgcaacttgacattttggcatatctacagttctaaataatttatatgttttaaaatcagtagctttaggtctaccttgttcatcaaatgccaattcttcactcaatgcgtatcctagacccatatgaatcccaccttctaattgaccttctaaatttaaaggatttataactctaccaacatcatgtacagctacaaaatcaactacttttatatccttagtttctttatctactaaaacttcagcaaaatgtacaccataagaagtaagtccagctggtgaagaataatcttcaacaacagttaactctcttaatgatttactttgactatatactgcgacatcagaaagtgatgcttttacattttcatcaagtttactaattacatatccattgtctagatataaatcttcttttgatgtttcaagtaatttttctgcttcttctactataaggtttttcaatttctctgctgtctttttagctcctccaccttctacaaatacccctctacttgcatagtcaccaaggttgaatgtacatgcatccgtatcagtttcaaatgtatcaactttatcaggtgttattcctaaaacttcagctaccatcattgtttgcatagttacgacaccattacccatatcatgtgctcctgttagtagtgtcaatgtaccatcttcatttaatttaagagtcaatgtaacaacatctctatgtgcaccaaaaactccattaccatgtgcacctattgccatacctatacctcttaaatattttccttcttcttttggaagttttttcttttcatcccacttaaacatcttcttaccttgctctatacaatccaatactctaggatttccaagagaaccgcggaagattatatcgacatcatctggctctactgcatttttattttgaaaatcgactaaatccatacctatttccttggctattttcgcaaattgagcctgttgagccataaatatttgaggtgacccatagcctctcatagctcctgctattggtgtatttgtatatacaggcatcccagtaaactttatatttggtattttataaactttaaatactttatgactaagtgctcctataacatttaaagcacttgatgcatatgctcctgtatttgtatatatttttatatcttgtgctattacttcaccatctttatttacaccagtttttaattttacaaaagacccatgacgagttcttgttgatatcatagattcctttcttgtaagaaccattttaactggtcttcttgtcatttttgataatgcggctgctactggttcaattgtaagttctaattttccaccaaatgagcctccaatagcaggtcttataactcttactttatttaatgacatcccaaaaatttgagatagtattattctaaatccaaatgtattttggcaaggtgtatgtacagttaatttatcattataatcatagtgtgcaattacactatgagtctctattgcactatgatgtattgctggagtagagtattcatcttcaaatatatagtcacattccttgaagcctttttctacatctcccccatttatgttgttttgagaaactatatttgaatctccatgtatgcagatagcatcttcttttattgcatcttgtatagtaaatacagctggcaattcttcatattcaacttttataagttttacagctttctctgctatttctggagtctctgcagctactgctgcaacacggtcaccaacaaatctaactgtatctgaaaatataacttcattttcaggtatattgtgctcataaaatcttaatgaaccattgtattttctttgtgatgtattgagataagtagctatagctctaacacctactactttctcagcttcacttgtatctatactttttatttttgcatgtgctacaggacttaaaagcatcttagcgtaaagtacattttgtggtttcatatcagccacgtatttcatttgaccagtaacttttaaagctgcatcttttagagggtatgattttcctattaccttttccataattatctaccccctaatctagctgcagataattttacagcttctataatctttacatatcctgtgcatctacagagattttctttaaaagcttctttaatttcatcttcattaggagatgcatttctatttaaaagagcttgtgttgttataatcataccaggagtacaatatccacattgtacagctccaacttctataaaagcttcttgtattggatgaagattttctccattagcaaaactttctatagtgtatataactttaccttcgcagttttttgcaagaagtttacaagatttcatgtcaactccatctatcaaaactttacatgctccacaactgccactattacaaccttgtttcgctccagttagatttaatttttcacgaagtacatgcaaaagagtttcattcttttcaacttctatttcatacatgtaatcattaatatttaattttattttttccattttctcctcctacagataaactaatgttgtaatagaatattattacaatcttattttaatattagtataagctattccacttatgtccttccattctattagttacattagctctcttacataattcttctgctgcaagttgtgcattaagcaacacttgttcttcactttcaattgtagttacttttccattttcaagtattacatttccatcaactaaaacactctctacattgtgcatactagctgagtataccaaagttgatacaggattgtgaagaggtattgattttggagaaagcattgagttaaatattactaggtcagcttttttcccaatctccaaagaacctatttcatcttccattctaagagttcttgctccctcaattgtagccatttcaagaactttctctgcagaaattgccagagggtcacaattatttactttgtgttgtaaagctgttaatttcataagctctaccatatcttgtgcgttattacttgctgcaccgtcaagacctaaactcacatttatacctttttttaacatttctggcacaggtgcaacaccagaagcaagatacatattacttgctacattatgagaaacttttatgtcatactttttaagcatttccatgtcttcatcagttatacatacacaatgtactgctacaacttctggacctactataccccatttttcaagtaattttatatctatttctccatgtatatcctttgttgctgttcttgcaaattctgtttcagatatatgaactgtaaaatatgaatcatattctttaactatattccaaagcatcttacccatttcttcagatatagcccacattgaagaaggagctacacagatttttattcttccattttctgaattatgatatttttcgaatacccttctcaaatctttttcaaccgtttccacatcttctataagctctttgtgaatacctaaatctatacaacctctacctacaacccctcttatacctaaatctttatatgcctttactattccatctgtaagtcctggtctattgtgagtatgcatataatcaaccattgtagttataccactttttaaaccttccatacatccaagcattgcagcatcataagtatcttgttctgttaagaattttgctgatggaaacatcattgtatttaaccactcatgaagtgccatatcatcacctaaaccttttaataacacttggaacaggtgattatgagtatttataaagccagggaatattacttttccattagcatctataacttttttagcatcaagatacttaggctcaatatcaactgtatttcctatatccaagattctgtcaccttgaatagctattgctccatcaaatataacatctctgtctttattaactgtaacaattattgcattttttattagtatatcaatcatcttaaatccccctttgaatactttcattacaacattttaccatatggttttctcatattatatctaatacatttatccaatattttcctcaagatttgaagtaacgttttcagcacttttacgtgactttaatttaaataatgtttgaagtaatatagctattattgctccagaaactatacttgaccctccaaggacagttccaattgtttctgggaattggtctaaaacttgtggagcagttgtaagacccatacttgttgctatagatacacctgctataagattgttttcttcagtgaatccatccatactcataatagagaaaccagacattgctattgatgagaaaactactaaagttgctccaccaacaacacaagatggtatagttgtcattattgcacccaatgctggagatatccctgctagtaataatacaagtgcccctagtgctattacaaatctacttgtaactttgttcatagatacaattactgtattttggctaaatactccagttggaagagctgcaaatagtgatgaaattatagaagttatagaatttcctaaaacaactgatgctaattcttcgtcagttacctctctatccattgctcctactgtagctattgtacaggcacccatcatatcagctatacctattatgtaaataatagtaaacattactattaactctggtctaaattctaatccaaaagctgctggtgttggtaaagatactatagctgctccttgaacggctgagaaatcaaccaatcctaaaactaaagatatagcataacctactaatattcctattaatattgaagaattttttactaaacctttaccgtatttatttatcattattattacaaaagcaactataactcctactgtgaagtttattgggcttccaaatgtttgtgtgccttctcctccagctaaattctttatagctgttgcgaatagtccaagtcccatacatgctattatagttccagaaactattggagtgaatatatgtctaattttcttaactccaaatcctacaaagaatacgattaccccagcagcaatctgtgctccaaatagagctgctaaaccatctttagctgctactgaaagacaagctcctaaaaatacataactcattcccatcattacaggtaatcttgaacctaacttaaatcctttaaataaaggtattggatataactgtaaaaacgttgctaaacctgctgctaacatagaaccctgaatcaacattgttgcttgcccctggttaagtcctaccacgtttgctattaatatcgcaggtaccatatttcctactatcattgctaacagatgttgtaaggccaaaggtattgattcctttagtggtggtatcccatcgacatcatattttgaagtattacgtgttttcataaaataaatcctcccatacataaatatcttgactaaatatttttataattattttctataaatatttttatgaccatgaatttattgctcaaccgataaacacagctaaactgagctatttttataaaaaattaacaaatttctaaatattccctccccgattttcaacttaaatgaaacattaattgcctggtatatatttatttgttaaattttttattaaaatgaatagctatcaaaaataatctaacaatctcatactaaataatttaaacaattcttttaaattattatatcttaattagtctcttccataacagctctttctttagcctcatcctctagacttttatttggtattattagatttaaaacgaatgcaaccaatgttgcaattactattggagattctccaaatactaactttacaaatgaaggaaatgcctcttgggctgctggtactgatgttattcccatgcctaaggcaattgccaaaccaacaatggtaatatttcttgatgacaactcttctgtaataattaactttatacctgtcattgttatcatactaaatatagatattgtagctcctcctaaaacagaatatggtatagtagtcattaatgcaccaaatttaggcacaaaccccgacaataacataaatataccagctattccaagcacaaatctacttattactttgttcatagctaccatccccacgttttggctatatgatgatggtggtaaacctccaaacaaagctcctatcatagtacaaattccacttcctattactccacttgataattccttatctgtgatattcctatccatgcctcccattgtagtagctgataaatctccaattgcttgaacagcattgattatacttacaattactactgagattattacaggcatatcaaattccatcccaaattcaagcggtttaggtatcgcaaaccaagttgcctctctaatagggtcaaaatttattatacccagaactaaagatacacaatatccaactataattcccaaaaatattgctgccaattttgcatatccttttgcaaattgactaagacctataactaccactaatgttatagccgctactgcccagttttgcatagaggcataagtaggactatttacaccacctgccatataatttattgctataggatacaaagataatccaattgtaaaaaccactgttcctgcaactatattcggaaaaaattttcttatcttttttatgaatatccctattaatactgtagccactccccctattaattgtgcacccaaaatgcttgctaatccataatttcctccgactgctacaagtgttggtacataagtaaaaccaactccaaaaattataggcaatcttgaaccaatatttcctattggatatagttgtataagtgttgatataccagctattattaatgcatattgcactaaaagtgttatttgtgtagggctaacacccacagctcctcctacgactataggtactgtaacagttccaactatcattgctagtatatgttgcattgatagtggcaaacactttaaaattggtggccttccatcaatatcaaacatagaaacattcttttgatatttactcaaggttatcactcccaactattttttaatgacagttattattatctcacacaacatcctttctttttttattttgtcatctcaatttaatatgaagcaattataatgccaattttttaacataattgttttacatatataatttttattatatttgttagtatttgataatttattaaagcatttatttttttaaattcttttaaattttttttatttttggataataaaatgctattacacaaaaaaacacttagaaaatagttttccaagtgttttttatcaattttataatttcaaattttagaattgagaataaaaaacctaattattatacatctatttttctgtacaatgtagctagtgatattccaagttttttggcagccagttttttagacttagtatcatttccgtaaaactttaacactttctttatataggctctttcaaactcttcaagtgtaagtatgtcttgttccatacttatctcatagtcactttcctcaagtaactttatatttatattatttaacttaaaatattcaagtatctttctatttattattcctttatgtattattccatcttcctcaagaaggtttaatgccagttctatagtattttccaactctctaatatttcctggccaaggatacttaagcaacatttgttccacatctggttctatatggtacacgtttttcttcatttttctcgaatatttgtctataaaattatttattaatatttgtatatcgtctcctctttctctaagtggaggcacttctaaaggtattacattcaatctatagtataagtcttctctaaatttattttccttaaccaactcaaataaatctctattagtagctgatatgattctaacatctatatcaattagttcatttgaacctattctcgtaaacttcttttcctgtaataccctcaataactttgattgtagttgaattggcatatctcctatctcatctaaaaatacaacccctccattggccaattcaaacttaccaattttaccttttgaatctgctccactaaaagctccttttgtatatccaaaaagttcactttctagtaaaggttctggtatagcagcacagtttatagcaacgaatgttttattccctctgtttcctgcgagatgaatggctcttgctattaattcttttccagtgccactttctccagttatagctacagtagaatcactatttccaattttgcaaattctattcttaagagcacgcattacatcagactctccaattatggagtctactgttgttgttccccaaatattatatacttccattccaccatacattactgaatcactgtgtttgtccataaaatatcaactccaaataagtattctatataataatcattcacattatctatttaattatatcataacagaaaagcttagttataatttaataatattattttaaaacaaaacttaataaaaagtatatctacttagttttaatttgatagatatactttcttcattttacaaaaatcctctattaaataagcaattacaatgccatattttatatgaaaataatttttaaaatttttaatttaagttcttattaaattttttatactactcgtaatttttatacctatataaaattacttttataaattttaaaattcttatttttaaaatttataattaaaaattatcttttttaaatcattttttgtgttttttatatcatctaacctcacagtttttgcttctataaacttacccttaaatgattctgataatttccaggaactataattcttatctttttgaatacaaggatataataatatacatctttttgcattttcatatgctgttatatatgcatacatctggtatatatcacttgacctataaaaaacatttgaatctacttcaatagctttccatttagtgtcaattataatttcatattcattttttaagtcatataaaactatatccggtcttaaattaaagtttttcttacctgtttgttcatttttcaaaagaaatttactcttatcttgtatatatgtttctctaaatgaattgtcccatatacttttgattaaaattcctatatattcttcatacaaagtatttatttcaaataatatagaaaatgcctcttgattattttgactattatccatagatagatttaaaagtagaagtctagctagtaaataacaatctttaaatctatcattgtttttataaaatttataacccaacagtttttttctatctatataaattaaatctacattttgaaaatagcttaaaatttttttaatcttgccttgaattgaattgtcatttattctacataaaatagatatacatgcttttttaagaacttgattcaagaaattattttcactacactcatcatattcacatcttattttcattggagaaatgcctttttcttttgcatatgtacttaataatattttacccctcataacatttaagttctctattttatttatatattcaaaataaataccttttttcatctgtgtttgcatactctcaatgaaatacataacaaaaaaatttaagagattataatttttcaaactcaatcttattttttcattcattgtaattggaattttattacatatagaaagcatctgtaatagtatctctctatcttttacaagattatcacttaatgacaatttaggaagtatttcaagtattacattttcaaaacatatgatgcctacatagtttataaatctaatttttttgtatttaatatctattatattactttttaatacatcattattgttctctagatatttaagcaatttttcatattcaatttctgtaagctcattttcaccattacctacccttatccattcataggtttccttaacatatatatttttactcatatatattttttagctcctcactagatatgttttgttttatacaatagttaactttactctccattattgaggcattattatttttaaataactcagaagctataagtttttctttataaacaatgtatttatctttttcatttcttccaattcctcctaaaatcaaacctactttttctgaatcataataaaaatactcttgaagaagtggtattattttacttctaaatactactactatatcattaatattttctacagcaagtagataagcttgtccaataacatggtctctatcatataaaaactctatccttttattgattgtatatagcatttttctaatatctataccatctacaatagacaataaatcataatctggcataatttcttcaaaattaaaccttcttcttaaagctatatctaaaagtgctattgatttatctgatgtgttcatagttccaactatatacaaatttggaggtagagaaaatttttcctttgaatatggtagtttgacaatagtttgatttgatttagtaagtcttttatcatcttccaataatgttattagctcaccaaatattttagatacattccctctattaatttcatctattattaaaacatagttttctgattcttcaaaattaaaactctcactatattctatattttctaatactaatttctttttcctgtcttttatagtttctaaagtcaagctatctttttccaactcaaagctcatctttttttcaaatttcaatgcattataacatgcttctatagatatatcctttaatatcccatcttctggcttaaaattgccttcaccatcagacttaagaccctctataaattcctcatatccatatgattgatgaaatgtacaaaattctacattgtttttataatctaagtaacctgtatagtatttgtttcttagactggtttcacttactagattgtaaaccatctgttttgtattgtatgttttaccagttcctggtggtccataaagtatagtatttaatggcattttattagtaaatctttttacatacttttcaactatactattattttcaaatataacccatgcatttccgtctatattctcctttccatactctatccatctaacaggaaaaaaatatccaccatccaaagcacttactttctctttatcgaacccttccataacttgacatacgccaaatagactcttcattgtatggtcattttcacaaattactttctcgctattatacaataaaatataatcatctgtctttatattttttaggctttctaattgttctagattaatgggctgaataaataattcttcatcatctacacacttatctacatttttataataatagttttttaaataccatttattattttcactttcttctattctttttctcaataatttcttatcttgtgacttaataatttctaaatatgaactaatatcattattatttaatttataaaattcacttgtatatactttacaatttgaaactgtatcaaaattatgcatccattttactggtagtgtatgccctaaaatatgacttaattcatatccattttcaaaatcttcttcaactatgccaatagacacattacatttaactttttcttctatattttgatatgctttatataaaaaataatctccttttttaatcgacataaacttttttataaaatctttatcattacaattctcattaatatacttttctgattttttccccatactgaatactttttttaaatttatttttatatcaaatccaagtgcaattatgctttcttctataaaaatctgtggtgtgtctgtttcctgataaaaaaattcttccattaaccaatactctgtacctcttatattttcagacatatacactctccttaatatctaaaatatactaattatacaataagcctactctaatatttccatttaaattttcctttatatataaagaaaatattacttcatagctttcttctaccttgctctgaatattacttattaaatcattcaattccattatagaaaattctggacttccttcaacaaatacaattcctttcttacttataaattcctcaccaatatattccatcctgtcaaataaaatgtcagctatctcgctatatgactttgtatcttcaaactcttcaaaagaatacttaattcctttatctcctacaatagcttcttttaaatcagtaatatctatatttatcatgcaagaatcagaaatagactctaccatgatattcattaaatcaacaaatttaaatatactatcattattgattttaaactctctcccaagctctaaatcttctttattttctttctctgaacaatccattcctatagatagaactcttctttcgtttgacatatatgaaacagcttttataatatctctaatatgtttatcttcagatgaatatatcaaaaataatatatctacaccatctaaaagacttctaacatattctttttcaatctcttgatttatgtttattttttctatatccatatttgcttttattttttcttctacttcatttattatattaataccttcaactccaataccaattattttagcattcttattaaaattttccattataacgtatatctccttaataattatttaatttcaacatttctaaatattataccatattttcttcataaaaatatcttaactcattggccttatcataaagtagcttattcaaaaattttggctctataaccttagcattatttccaataaaaaataaaatcgaagcataacaatctatatcttcaacctttatgaatgtactaattattccactaccatcttcatttagctccatatctaaattccaagaactgtcctttattttagaaacaccttctttagttaataatacatttagataaataatttcaccaaattttttagtagttgaactatttccatataaattgttatatacttcatgtaaccattcttccaagtttatatgtatttttttactttctcctgttctttttatatcaattatattatctatatgaactaatattattttatcacttttacaatcatatgctggtgaaaaccatgctcccttatttaaatatatacctatagggcatacgtttttttccaaaatctgattaccacacttatacttaatatttaaaattagagattctgaagaagctctaaaaaactcagttacattactactcttaaaatctccatcattagtatcattagctacaaagccaatgtatcttttaatattttctatacctacttttatactgcttttacgttcataacttacttttctcattatagaattaatttctatttccattaacttataattataaatctgaagtgacttaagtgcaaatagtataatcataacttctttttctgtaaatataacaggaggtatatagctattatttagcaccctataacctccatttctaccttgttctgcttgaattggaagtcccattttatttaattcttttaaatatcgttgtattgttttagctgaaagattaaattcctctgacaactcttttattgtaaacttttgcttatcattaatatatatccaaacatcagtcaatctttttaccttcgacaaataaacacctcttttcactaataatactctcaattaattaaattactatacactatttaaaatttaatattaatgacatttttatattttttcattaaaaagcagaaaaatggtactcctacaattgttactactacaaattctccaaaacctacctgtatcatagatagaattaatggaagcccaaagaatacatttaacattagaccaaccacaatcgaatttataacagttggccataaagaagctataactaaagtacttttattttgtttacctaactttctagtaatataaatcatacttgcacttataaatgtggctaatgttccagaaattatatcaggtacaccatatggtcctattacatttgctaaaaaacaacctaatgtaagacctactatatatcctttatctaaaaatgccaaaagcatcataatctctgctaccctaaattgtattggtccataacttataaatcccaatgataatgttaaaactgcatagattgctgtaattgctgcagttagtgctatattaatactattttttctcatatctgtctcctagtaaaagttttatttctaaaaaaattaataacataactttattttatacaaaatctataaacttaaacagtaattttataaaaacaaattattttagcgaactattttccaaattcattttatattatacaatataatacatacaaattcaattttatatatatagaatatatgatattaaaattatatacaaactaaagataaattttctattgttaattaaaaacagcaaaaaagagccttaaaattaggctctaataatttattttaaaatcagtgaactctactaccatcttttaatttagataatatcatccaagtacctatacaatcaatttccagttgtttctctatttcatcatataacatttcttgatatgatgtatttaaaacaacattttcaaccaatttagaaatttcctcttctgcaaaatcaatttctatttgattttgtttttctttaaaaaatacccttacttttctctgacttattgaacgaccctcaaagctgactaaacattctaaaatgttcttatctcctctaaaattatttactgctctcatattatttagattaccagccaaaacatcatccccttatttaattttgtattttataagtaaaattcataatattataataactacttattaaatatctttcaacaggtatgacataactggttgtttaacatgtaaaactagtctaaattttcataaataattatttattcatttccataaaaactttttcaggtgtaatagggagtgtatttattcttacaccaattccattaaacacagcttcttgtattgctggtaaaggtgtatttataacaacttctccaacagatttagcaccaaatggtccagttggttcataagtttcaacaaaatctactttaacatttccaatatcacatctagctggaatcttgtattgcataaatgtatttgtgtccatgcttcctttttctgtgtatctaacttcttcaaataatgccattccaatcccttgaacaattccaccttcaacttgtatcttagctagatttttatttataaccgttccacaatctactacagctacataatttactaaatcaacttttccagtttctgtgtcaatttcagtttctgcaaaacctgctataaaaggtggaggagatactgggctaccatgagaagcaagacctattaattgattagtatctggaccaattgtagaatcaactgctatatcgaataataaagtgctaccttttttactagttaattttataccatcaaattctacttcatccttctcaacacctagtttagttgctccagcagaaattattttttctcttaagtcttgagctgccttaactactgccatacctgttacataagtagtacttgaagcatatgaacctgggtcatatggaactaagtcagtatcagctgatataactgttatattttcaatgcttgtatcaagaacctcagcagccatttgagctaaaatcgtatcacttcctgtacccatatcagtagaacctatcataagagtataatctccacagtcattcaattttatttcagctgaagacttatcaagaccttgtataccagaaccttgcatagtaattgccatacccacacttctaatttttccattatcaagatgtttacaaggatatttttcattccatccaataagttctttgcctttatttatacattttattaaatcgacactatttaaagttttaccatatgcaaatgtagtttcaccttctgttaccacattttttaaccttaaatctgttgggtccatttttaatttattagcaagcatatttatagttgattcaacagcaaaacatccttgtgatgctccataccctctaagtgctcctgctggcatcttattagtatataccacatctgcaataaatcttgttgcttcaactttattatacattggtaaagttttttctccaaccaaaccaatagttgtagaagcatgctctccatatgctcctgtatcagaaagtgcttttatatctattgcctttattatgccatcatttgtagcacctagtctaacttttaatctcattgcatgtctacttgttgaacaattaaaagtttcttttctatcataaattattttagctggtttccctgtttttaaagtaacaattgcagaaaaaatctcaacacacgcagtttgtttaccaccaaatccgccaccaattctaggttttataaccctaattttgctagctggtatttctagtgcacgagataaatgtctttttacatgaaatggtatttgagttgaacttactacaaccaatcttcccatatggtctaaataattgtatgccctatacgtctccatcattgcatgtgcttgagcttgagtataataagtttcttcaatcactacatcacaattacttaatactttttctacatcaccttttgtataatcatgatgggatactatatttttttctctttgcatacctatatcaaagttacaatgtctatcttcatcatgtaccatagttttatttcctattgcctcttcaaaatccaaaacaggtgtaagtacttcatactttactttgataagattcattgctttaattgcagttttttcatctatagctgccactatagctacttcgtcacctacatatcttacaacatcttcaagaattaatctatcatatggagatggctctggatatgtttgaccagcaagtgtaaatcgagattttggtacatctttatatgttaaaacacattcaacaccatcaaccatttctgcctttgatgtatctatatcttttatttttgcataagcgtgaggacttctaagtatctttaccaccaaagcattttttgctgataaatcatctgtatatacaggctttcctgttgtgatactcattccatctattttcttgattccttttccaactatattcatgttctattttacctccagataagttttgatagctcttaactgtcccatataccctgtacatctacatagatttcctgtaagataatgctttatttcatcatctgtaggattttcaagctcatccttcattgcaagtacagtaagtataaagccaggagaacagaaaccacattgctcagctccttcttttaccaaaacttcactaaattctttaacttcattttctaaaccttcaattgtagttatttctttatctaaagctctcaatgtcagtgttgcacaggataatgtaggtttcttgtcaattaaaactgtacataaaccacaacagcctgtgtcacaacctcttttcacacttaaattaccaacttttcttaaagtatcaaccagatattcttctggttctatatcaacactttttttcttcccatttatattaatctttactaacattaaataacctccattatagctctttttaaaagtactttactcatagcttttctatactccctagatgctctcatgttagaaccaaaagttagttcttctgatgctatttctactgctttatctatattaatttcattgatttcattgttagatagaaattcactagcttgttttgcaatcgtagctttctgcggtcttgctcctacacataacttaaattgttccatatgttttgatacagatacatttagaattggataatcactctttgcatttctaagtgatttataagaagcattcttatttgtcttctttatgtatatcttaataagtaaatctttctcataatctctatttagaaactcttcaagactaattctcccaatattatataattctacttccgtatctaatgaaagtaatgctactatcaagtcagaaaaaccatatttagaaaatactgttgcaccaactgttactacatttctaaactgaactcctattatatttttaactgaatcttctattattcttccaaaattattttttattatggaacttgtttctaatgttctaaaagtagtcatagaaccaatctcaacgtaatcttcatactcttttatataatctaaatttaatttagataattctattcctgttcctattctttttttccccattcttaaaaaagcacttccaccaattacttggttagtttttcttttatttaaaattgagtacgcttcttctactgtatctggctgtacaatatccataaccgtaaacataaatttcctcccttatttgctattcttattttaaatacaactaattatatcatagcttcaacaaattttgataataaatatgtctaatatgtaaattctgtaaattacttatacataaaaaaatgactatttcaataatcatcattagacaatattaaaatagccattaacaggtactattttaaagcaaaactttaaaaagttgatactttttcacttatatttatcacttcttcttctaataatccaagttttttagctactaattttgtagtacttccttgtattactaatgtaattaatatagtcataaatactacagatgaaatcacttcgtatccaggaactttcattgctgaaataataccacaaagtgctgctggtattacgcctgtttcccttacccacatcataaataatatttcacttttactccattttgcttccctgtctacaagtgtacaaactaaaacgcaaagtggtcttgctataaacattaatactaatactgtaattacagatggcataaaatatttacttaactgagccaaattaacttggctacccaatattataaatattgccatacgacaaatagtacctaaagtttcagcaacataaaaatctgcatcataagatttttgacttaaccaaattttaaagtttttcttgttaccagttattatacctacaataaagcaagacatatatccacttccacctaattttgtagataattcatatgcaactacaactgaaataacagatattattggtgcaaaatctttaaatattccataaggtttatcattaactaatttcaaaagcagtattcctgtaattaaaccaactaaaactccgacaataaccattgtccccagttcataaatattttcacctaatgaaaatttatttgacaaaattacagccaacactgctgatgttagtatagctcctgttgcatcattaaaagctgattcacttattacagtttgttttaccctatcctttatctttacctgattaaatataggtacaagagtggctgggtctgttgatgctattatagttcctgctagtaaagcagtcattgcacttatcccaaaagtaaatcctattacttgttgcattataaaagcagatatcacaactcctaaagtagctaataagaatacagatatcttcacatttctcaatacttttaaacttatttcttttccacctaaatataaaataaatgcagaaccaaatgtaagtattagttgattttctatttgaaatccacgaatatctataaattttaaaaatgatggtcctattaaaatacctacaagtaaatataacactacatctggaacctttattatttcactaagcttactacaaattattccagttatacttacaatagcaaaaattatcaataaattattgctggcaattgtgtgtatagatgcttccatgtccgtctctcctcccgatttgcatacattatgcaatatacttattgttttactatataattatagcacacaaataaatgttatcaatcattttttttaggacatgcaatttagctttcatttttgataattaaataacgcttatataattttgctattttttgctagttattaaaaggttgattttgtcaagtttatagtatatatatattaatattttttatatccatatctttttagatatttttcgactttttcctccattaaaataagtttaaatttaacaataaaacatttcattatatatattttttaaaatgtaccattttcaacattttcattaacttggtctattcatttttttcttatctattctatatccaagcatattccctatatttttacttacatgtaattcttgagctatttcaagtttattatcattgctttgttttatcttagaaatctcactttgtttttcattttgtttatcttgtttcatagtttctcctttcaaaacaatatcactttttctgtttattacttattatttcaaatttctataattttaatcaaaaaagggaaatatctcaatataatatagcttactcaacaccatatttatatatagaatttccctaattattttattaatttaatttttcaataaccttatctaaattagaatttactttatcttcctttttccaagaatttaatgtataatgcgttccaaatgtaaataaacctgaaactattaatataaaatagtatacaaacccactatataagagtacagagtaccccaataattcttttggaattatattggagaacatagtaaaaaatgtaacctcattagctccaacatttcctggtgttggaattggtgatatagccatatataaaaagacctgtaatgtcattatatgtacatatgaaactcctcttaaatttgaggctttatacacacaataaactatactgaaatatgcgattaattgtaacacagtaagtaatatacttaaaactaagattcttacatttttaataaatatttttatagaataattataatcatcaatataatgatttattctatcacgttttgaatctaaaaatttaaatgttttaaatttagataaaaaattaatcaaaacttctgctatcatttttacttgttttggactaaatactattaatagtccacctaacaacatacttacattcataatcattccaaaagttatcaagactttcacagaatgtacttgctccatcagtaatgacttatttagcaaaattaaaattccacaaaatacagtaactgtactttgaaatactacagttttattagtaactatagccactgatttactaaggcttacatcatattttgtaagtgcatatatttgcattggttgactcccagatgcaaatggagtaactaagttatagtaaaatcccattgtagccattttaataccaataaattttacttttgttttttgaactgcatttattatcaaatgagttacaatagattcaattatcatatatactataattgtcaatatgccaagaaatatataagtcttatttactagccttataattttaggtattagttttatatctaaagtagttaatactaaataagtagtaatacatatcaaaaataataaaaatccatattgaataaaatctttttctcttttggataattttctcatttattttctcctaaattttttcatatcactatacatagtatactacttaacctattatttgcaagactaaaaaagataagtctttatttgacataaatacacctataaatttttaaatattcttactcctttagtagaaataattctccatatcataaaatctaatataaaagtaagtatacttgccaaaataatatatatatttaaaaacgaaattccaagtaatacatatatacctccaagtataattacgtaagctaatgatactaacattgtaattatcatacttgcacttctttttactacagccatctcatttttccaatcaaggtttggatataataaatttgataataatcccatcaatgccacaaacattgaaaaacttgcaatcaaacagattgatacaataataaactgaatttcaaaacctaatcttatagatactaatattaaacataaaatagataatggtgcattcaataaaaaattcatcaatatttttgaccagaatatttctctttcatctattggagaagatttcagtatccataaattttttccttcaagagaaattgaacagtatgttgtacaattcattactattataaagaagaatactcccaataattgtatttttataaaattaaaatctatattcaatttcagtaactcacccactttatctgctccaaataataatattaaaattgtacctattattaggaataacaaacctgcagatgaatttaaaaagtatataaatgaagaagtatatctcttaaattctttttttaatagagcttttgaaggtcttgaagttttttggctcttaaatttataagtttttgacttatatccttcactcatcttagcatttatatctttaaatttttttgcaaataatgttacaaacataaaaaatggtattattgaaattgctataaatgctaaaaaggaaactacacttcctgttttaagagcgtcaacaaaataatatataggtggatatatttttctaatcgtctctgaaatagatacactattctttaacatctcaaccgacatagagttaagtcttgtcataagtagagtataaagcaacatcaatataatactacctataattaatattaaatttttgtattttattcttgatgatatctgtcctataaacataaaaattattgatgaagcaactattggtaataatggtaaagctaaaaatagcagtatcaaataagggaaatacgttatacttacatcagaattaaaaaaataaaccactgctggtataatcatacatattgaagaaaataaatagtttgctccaaccaacattaatatcttacttgctagtacagtagattcttttataggtaaactagtcaaaaggtctaaatcttttgcttgaaacagatatgatgacgttttatataatgatgtaacaatagttgttaatgttgataatccaaatccaaatataagtagcatttccatctgatttatttgctttaaaatatcaactaaagaaagacttatactagttacataaaaaatcaataaccctgttataataacaactgaaagtatcatccccattattttttgtttttctctactatcagctttttttaacgcatttaatttaaattcatttattatattagtttttattaatatacttagattgctcatattttatcattcctcactttagacactatattgtataaaaaacattttatttctctattaattccataaagatactttcaagtgaattacttcccttaacttcttctgtagttccataagcaattatatttccatcttttattatggcaatcttatcacaaattttttcagcaacttctaaaacgtgtgttgagaaaaatatacaaccacctttgtcacaaaactccctcataatttccttcaatataaaggaagcttttgggtcaagacctacaaaaggttcatcaagaattaagatttttgggctgtgtatcaaagccgaaattatagctaatttttgtttcataccatgcgaatatgaagatattaaatctcctaatgctttattgagttcaaacttatttgaataatattttattaactcttctcttttgtctttggcaacttcaaatatgtcagctataaaattaaggtattgtatacccgttaatgactcgtataaatctggattatcaggtatatatgccatttcctttttacattcaacaggctgtttttttatagatttagaatttattagtacttctccctcttcaaaatcgtgtattccaacaattgctttaatagtagtagttttacctgctccattatgtcctataaacccaaaaagctctccatcatttacatcaaatgagacactacttactacttttttatttttatatgatttagatacattgattacttttaacataatttccctccatattatagttttgatatttgttatatataatatataacaaatatcaaacaattacaacttttatttgtttattttagaaatctataaaatgcaaaggtatcagaaatataaaggtataaatataattgatatttactttcaaattacacataattataaaagaatatatagttcgatttgaataaacaatgtataataaaaaatagttgactataattattaaatataaggagcaaaatatgaatacatttgaacaattaaaaataagttccactctaatagatggacttaaaaaacaagacataacttctccaacagaagttcagtcacttgttatagggaatataattcaaaataaggatttattgattaattcacagactggaacaggaaaaacactagcgtaccttttacctatatttgaaaaaattgatacatcaaaaagagaaacacaagctcttatacttgcacctacgcatgaattagtaatgcagattacaaaccaggttgaattattggctaaaaatgcagaactctccgttacttctttagctttaattggggaggtcaatatacaaaaacaaataaaaaatataaaagcagtaaaaccacacatagtaattggctcttgtggaagagttttagacttgataaaacaaaagaagctaaaatcacataatataaaaactatagtcttagatgaagtggacaatctattgaatggaaaaaatataacttgtatagaagacataataagaacaacgttaagagatagacaaattataggatgctctgcaagtcttactgatagcactataaaaatttgtgataaacttatgaaggagtttgaaataataaaaacaaaggaaaaatcacaaataaatcctaacatcaatcactcatatttattaggtgagataagggataaatttacttttcttagaaaggcattagcagctacaaatccaaaaaaagctattgtatttgtaaataatgaaaaaaatatagaagtcctagtatcaaaactaaattatcataattacaaagcaataggaatttttggaaatatggaaaaagaagatagaaagaatgcaataaataaatttaaacttggtaaagcaaagattttaattacaactgatttatctgctcgtggactagatattgtggatgtaagtcatgtttttaacttggattttccaaaaagtaaaaatgaatacctgcatagatgtggtcgaacttctagaggaaatcgaagtggtaacacaatctcaataataacaaaaaaagaattagatattataaaagatttgcaaaaagagttcagtatagtaattacacctaaaactttacaaaatggagaactaatagacattattaaataatacaataaatacgaaaatacaacaaatacaaaagagctgtagtttatcatcacaattgataataaattatagccctttattttatattaaattaaaattttaaataatacctattataatagccaaagttttattataaataatattgccagaacaatcattactacagaaacatgttttttgtcttctgcctttttagctccaaatatattataaaatatatttacgaaaacataagttaatatacctaaagttaaaccatcacctatactatatgttaatgccatacaagcaatagtaacaaaagctggaacaccttcagttatattatcaaactctatatccttaactgtaccaagcattaaatatccaacatatattaaagctggtgctgtagcacatgatggaattgctataaatacaggagagaaaaacattgcagctaagaataaaattccaactgttattgctgtccatccagttcttccacctgcgataactcctgttgaactctcaacataagttgtaactgtagatactccaagtcctgcaccaactgtagttgcaaccgcatctgtaagtaaggctctacctacattaggaacattccctttttcatctaacatgtttgctttagaacaaacaccaactaatgtacctactgtatcaaaaaaatcaacaaataaaaatgtacaaactactactaaaaaaccacctatatttgttggatgtagtacatatcctaaatctattttacctgctattggtgctaaactttcgaatttaaataatccaccaggtaaatatatacctaatttttgtgcatactctggattcataaaagcaaatgcccaagcaagtaatgaactcactactattccaaaaagtatagaacctttaactctttttttatctaatacagcaataattattaatcctaaacaagttattattactgctggtgtaaatctacccattttgataagagtggcttggtctccaataacaattccactgttaactagacctataagtgcaataaatattcctataccacctgtaacagctaatttcatattttttggtatcgcatttacaacagcctcacgaactccacttactgataatactataaaaataataccttctacaaatactgctgtaagagctacttcccaaggaacacccatttgtaaaactactgtatatgcaaaaaatgcattaagacccatacctgatgctaaagcaaaaggaaggttagcaactacacccattaaaatacatccaaatgctgctgctaaacaagtacctgtaacaagtgcacctgcaggcatgcctgtctcagataaaatatttggatttacagctattatataagccatagttaaaaaagtagttactcctgcaattatttccttcttcatgtcgacatttttattagtcaaaattggaaaaagtttctgcatagtactactgtttgttgtttgcataacaacacctcctattaaattttacaaaaaaacgacacagtagttgataagctgagccgtatccttcataattcagttaattaaatatttaattaactaaataatagtatacatagtcagaatatttacggtattccggtagaaacttatgacccatattgtcaaaattatatgttatacagtacaaaacatgaatttttctttacgaatattattttaatttatataattaattttgtcaatatatacgtatatattgtattgattttgtattaatattcgattatattaaatattgatttattaaattcaaattataattatattctttacattttaaaaaaatatatgatattttgatacaatttatttatagtttggatataaagtttatgttaagattatactataataaattaataatttttttatttggaggaataaggtgaaagatttaactacaggtcatgagggaaaatccatattcttttttgccatgcctatgcttattggtagtttatttcaacaactatacaatacagctgacagtataatagttggtagatttatcggaaaagaagcaatggcggcagtctctggagctaaccctataatgtttttattggtggcagcgcttatgggtgttagccttggattttctattttagtgtcacaattttatggctcaggagatttaaaaaaggtaaaagctactattgatactacatatatacttttatttattggttctatattaataagtattcttggaatagtatttggtggcccaatgcttaagcttatgaatacaccagaatccgtttttgctcaatcaaaattgtatcttactataatatttagtggaatattattttctgctggatataattcagtaagtgcaatacttagaggacttggagattcagtaactccactttattttctgataatagccacaattctaaatatagttttagacttaacttttattgtagtgctaagaatgggtgttgagggcgttgcacttgccactataatggctcaggcagtatcatttataataagtataatttatttaaataaaaaacatgaagtgcttaaatttaaaatcaaaggaattgtatacgataacaaaatatttaaagatggacttagattaggacttccaagtggaattcaacaaatgttgttttcaattggaaatatgactcttcaatttttagttaatagttatggtacatctgctatggcagcttttggtgctggtcttaggatagaaaattttataagcttacctattatgaatcttggttctgctgtttctacttttgttgctcaaaacataggtgctggagaaaatgaaagggttaaaaaaggcattcgagaatctataaaaatgaccttagttttagcagttacagttattgctttaattttgctatttagggaaaatctaattgctctattcaatactgataaagatgtcattaaaattggctcttcttacttatttataataggaccattctttttatttattggaacttcttttgtactttcaagtgcaatgaaaggtgctggtgattccatgtttgcacttataagctcaatagtatctttatggcttggaagacttccagcttcttatatgctttctaaattttttggaacagacggaatttggatgggtattccttttggttggactttaggtcttattgttacagttatctactataagaaagggtattggaaaactaaagctattgtaaatcatagaatcaatgaataatctttttataaaatgtattcacattcattgtattcacctccattatgatataataaattatggaggtgaatataaaaatgggtattattcttaagccaaaacaattttatatgactgttatagttaccataattctctacttctctcttaattacagtttcaacataaaattttctatatgcttatcttttttaactatcttgatatgggctgtagactcagttgaaaaaacttttgttgcattgttttttgtaattctagcgtttatatttaacattgcaccaataaaggttattttacagtttttatttacagaaaatttttacataataattcttgcatacataattactaatgcagttacaaaaacaggtgtcgcaaaaattatttctgagaagttaattttaaatactgtaaatacccctaaaaagatgattcttttatcgtatattttaggtattcttttaatattttttatcccacaaccatttccaagggttattcttgtatctgctttttacaaggagtttttaaaagaacaacagataactgaagattcaaaatctatacttttatttagtatatttacagcatctacctttacatcaatgttttttgtaaatggagacacccttctaaattatgttgtactagaacttggaaattgtaatataaattggggtcaatgggctttttatatgtctgttccaactataattacttgttttataacttattttttatttatctttgtctttaaaaaagaattgcattcaataaaatttatttctaatgaaaatcttgagggtaataaacttcatttttcatattctaatttaaaaaaagaatttaatttgctaaacaaagagcaaaaacacgtatttttatgcctaggaataatgttttttatgtttttaactcagttcatacataacataaacacattaattataatgtcaatttgtgtacttcttttattactaagaaaaatagttggatttagtactttaaaagaaataaattggaaggtccttattttttttatagcagcattttcaattggaggagtgttaaagtactctggagttgtagatataatgggaaattatttgataaagtttataccaaactcttcagaaattatttcaatattgtttttgataactctcacaataatcttgaatatatgtcttggaagtgctgtcactacatcatctgtagtaataccattacttggaagtttacatatactaaaggaaaatagtgttactttatgtctatttgtctacattatagtaagcatacagtacatattaccatttcatcatgctacaataatggttggtcatggtgaaaatctgtataatagcaaggttattttcaaatacggtttaactttgattcctttaacctactttataataatatgtataacattcccttggtggaaatttataggactagaaatctaaaaaagatgaaaatatgaattaacttaagataataacgaaattattaaaaagaaaattcatattttcatctttttatataagttcttgtgaaattggacaaaactactcttttaccataatactaaatattatttgttttacttccttttccaaaagtattctcccaatcctctataaacttatctacactccaatcagttaatggatgattcatcatagatttacaaatatcatatggtactgtaacactatgcaccccatgttgcattaattctataacttgttgtgcatttttaaaactggctgcaagtacttttgtatccattttataagtatctattatttttataagttctgaaaccatagctactccatcaccagatatattatcaagcctatttacataaggtgcaatataatttgctccagcctttgcagctaaaaaaccttgatgagcagtgaatattgcagtagcagttatttttacaccttttctgtgaaggtcttttatagctcttaaaccatcttgtgttacaggtatttttacatatatattttttctcaaactacttatatataatgcttcgtctaatatttcttcatactttgtacttaacacttgagcatgtataggcatatcctcacctataatctcaccaatttcatttataagttgcttaaaattctttttttcttttgaaacaatacttggatttgtagttacaccatctattggtaaacaagtacataactccttaatctcctccacattacctgtatctaagattagttgcattaaaatatccccctttaatctttctttattcttattatatattgatttggtattattttcaacattttgcttattgttttttattttttattattgttttgcttttccttcttagttttataatttttttatttactaaattctaaatatatagttagaaaaaacatactttttatattaaattaattttgtatttcatgttaaaatagttgatatattgtattttatcttataatatttactataatactatattgcgaaaagaggtagaaaatgtttgcagaagaaagaatccaagctatattaaatatcctaaaaaaagaaggtagagttactgtcaaagagctcagttctaaatttaatgttacagaagattgtataagaaaagatttaaaaaatatagaaaagatttcttcaataagaagaatttatgggggagctgtactagctagagaaacactagagaatcaggatacaaaagacagaaaagaaattaatattccaacaaagaaaataatagcagaaaaagcatttaatttaattgaagatagagaaactatatttttagatatctctacaattaacatcttgcttgcaaagttgttagctgaaagtaataaaaaagtaacacttgttacaaatatgttggatatactaaatgtagttacttcaaaaccaaataatttaaatataatttccactggaggtttattaaatctcagtttagacggttttgtcggtactccaactatagagtttatatcgaaatataagtttgataagacttttatgggaagttgtggagtagatgtattcaactcttcacttacaacttttgaaattgaagatggtctcacgaagaaggctataataaattcaagtaaaaaagtatttatagttatggaagataaaaagtttaaatttgatggaaatttcaagtttgctcatttagaagatattagttctataattacagaaaaagcgcctactcctgatatagtagatattttatcagaatttaatgtaaatgttttataagtttaattatatattttataggatttcttataaatataaatttttatttgataactattcttaaaaacatatttctataatatttattttatccttagtatctattttttaaaatctagttctataacatctactttatccttatgtctatttataaaactaatttgaaatagactttctaaatctaatacagttatttttagaaagtctatttccttaaataaactatttaatattactggctactttttatatgaatacaataatttgttattcataaataaaagcttatttcatttcattcttcatttgcttctctaattctttagaaaatttcttttgttcatatctttccatcatctcatcttttttcatttctaagtttaccatagcaccttgtgcatcatctttcaaatcttcagctgtatttttcataacataagctgtctttttaacaccttcttttaaatcttctttcatatttttcatatctctttttaatctatccatcaaaactacctcctctgtaaatataatacttcctatatttatttttcccaaagtacatatatttatttgtaatatcaattataatttttaagtcttaaatatagtttaaactgtctaaatctatacatttcaataaattaaatattttttatttcaaaataaaaataacactaagcatagattatatgctcggtgttattttttaaattcatagtaacttaattgttgggttactataatgatgacttatatggaggatgtaaggaaatctcatcattatagttggtgtattttatggttttaagcttctttatatttatataatacagtttcattatgaattttttgtgattttaaaatgaactattattgaaagttatatattctttataataagtaattaatttttaaattctactgtgaatactacagagttttctttgttttttatgctataatcaaacccatgacttttaaaaatttgactgactatataaagtccaagtccacttcctccagtttttcttgaacgggatttttctattctataaaatggattaaatatctcttctaaataacgtttctcgatagttacaccagtattttcaatttctaaaaccactctttgattagaagtctttttacttattcgtttatttttatcatagagtctaattataagctctgatttttcaggagaatattttatggcattatttattatattattgattgccttagttattctctcttggtctgctttaatttccaaattttcttctatttttaaaatagttttcatatgtttttcttctattaaaaatacttgtctctttacaagtctatttaataattcacttatatttattgataccaatttcaaatctttttcaagtatttctgattttgaaacctctatcatttcatttactaaatcttttaattcttgtgtacattcatatgattttttcagataagtatccctatccttatacttacctacactataaatcataccttcaatttgaccacttattatggttattggagtttttagttcatgtgatattgtagcaacaaaatccttccttctatattcctgttctctctcactctctattatatttataagaggctttgttattacaattgaatatatatatgctccaataatcgctatcaatattgctattgatatgatgtatggcattagttttcttataacttcgtttgcttcgtcaattggttgtaatggcataacgagttctaaagtatatggaccatcttttgcatctttagtatatataggtatagaagttctatactcatcctcaagactattaatcatgtacttactatatcttaaaataactacttcattcttaccatatacaattttcccttggttatcttttaataaaatagccaaattttggtctttagccatataataaagtctttcttctaaagtatatgtatcgaaatgaattgaactatctactaaagattttaaactttcttgaagagactcaattttatactcatgataatatgatggcaataaaaaatataaaattagatatattattaaagctaacgctattaataatgatgtcgttattgaaaataacttatactttatacttaacttttcccacttatcaaatatccttctcaagtgtatatcctattccttttacagttttaatatatggtaacgatattttttttcttatattttttatatgtgcatcaacaatcctagtatctccataatagtcataaccccatatactatccaaaagaccttccctagttataacttgtggatacttttctatcaaagcttttaatatattaaactcttttagtgtaagttctataggttctccatctatctctgcaatatatgtgtttaaatctaattttaatttttcaaaaactataaatttgtcatttatagtcttgttacttcgccttaaaattgcttctactctttttataagaagattaaatgaaaatggttttgttatataatcatcacattctaagtcaaaccctttaagttggtctccttcatcatttaaagcagttaaaaatataattggaacgcttgatgactttcttatcattttacaaactccataaccatctaagtttggcatcattatatctaatattactaaatcataacttccttgcttaaacttttgtataccttccaacccatcatttgctgtatcaacttgataaccttctgcacttaaaaattctgatattaactcttgtatatttgaatcatcttcaattacaagtattgacgaattcattctatcaatcctttctattttatttaaaatttcgtatattacttatattttatcttattgttgtgaattttacatgaaaaaagagctatcttaatttgtaaattaatccttttaatttaaagatagctcttttggatacattttatttaatttattaatctaatctctcttatatgccttgaagtttttaagtctaagtgcatttgatacgactgaaactgaacttaagctcattgctgctgctgcaatcattgggtttaataaaggtcctccaaatacatataatattcctgctgctacaggtataccaatcgtattatatccaaatgcccaaaataggttttgttttatattttttatagtttcatgactaagtttaattgctgttggaacatcaattaaatcactcttcataagtactatatccgcagattcaatggctacatccgttccacttcctattgctatccctatatctgcttttgcaagagctggggcatcatttattccatcccctaccattgcaacaaactttccttgattttgtagtttttcaacttcttttgacttatcttctggtaaaacctctgccaaaaccatatctatacctacttgatttgctatagcatttgcagttttcgcattatctccagttaccattgcaacttttattcccatatcatgaagtatttctattgcttttttactactttctttgactacatctgcaactgctattatacctgataaatttccatctacagctatatacataggtgttttaccttggcttgccaatacatttgatttttcttctaaatccccaagctttatattattgtcattcataagctttctatttccaagtaatatactttcatcattaatagtaacttgtataccagcacctggtatggctttaaaattatcaactttttcaaattttatattcttctcttctccatacttaactattgcttctccaagaggatgctctgaacctttttctgcacttgaagcaatcttgataagatattcttcttttacattattatttaatactatatctgttacttttggctttccttctgttatagtacctgtcttatcaaatatcactgtatttactttatgtgcagattctagtgcctctccaccttttatcaagattccattttctgcgccctttccagtcccaaccattatagcagttggtgttgctaatcctaatgcacaaggacaagcaattacaagtactgatataaatatagtaagtacaaatactatatcttttcctcctattaaaaaccacaataatgatgcaactacagctattgcaattactattggtacaaaatatccagatacagtatcggcaagtttagcaataggtgcttttgtaccttgtgcatcttcaactaactttattatttgggcaagagcagtatctccaccaattttttcagccttaaacttaataacaccatttttattaatactagctcctgtcaccttacttccaacatttttttctactggtatactttcacctgtaagcattgattcatcaactgatgtatatccttctattacaactccatccacgggtattttagttcctggttttactaatagtatatctcctatctctacttcttctataggagtttcaacttctttaccatcaactaacactattgcagttttaggttgtagccccataagctttttaattgcttctgatgtttttccttttgattttgattctaaatatttaccaagtaagataagtgctattattattcctgcactttcataatacaactgatgatggtgcataccttgaatttgtccattggctatttgtagtgtcgtatatagactatataaaaatgcggctaatgttcctattgcaactaaagaatccatattagggcttaaagaaaaaagtgatttaaacccatttatataaaatttataaccagctatcattactggtattactaaaattaactgaattaatgcataattaaaagtatttgtcataggatttataatttctggcaaaggccatggccctataggctttattatcataggtcccattgctatataaaacagaggtactgcaaatactattgcaactataaatttaacaaataaagacttcatttctctttcttttctcaatttatcttcatccacatcaaccttatttcttacctcttctattggtttatatccagctttttcaatagctgcttttatttgagataattttacttttgatgggtcatagtctatattagctttatctgttgcaatattcacactaatactttctactccatccaatttttttaccactctctctacagcttttgcacaagctgcacatgtcattccatcaattttcatatcaatttttttattactttcttcctttataattccatatcctgctttttctacaacctgctttatatcatcaaaattaaccttagaattatcatattctattttaagtttttcagtagctatatttacactttggtcatatactccatccatcttcttagttactctttctactgcctttgcacaagctgcacatgtcatacctgtaattttataactttctaccactttatttgaactcataataaaatcttcctttctttcaatatattttcagctaatttgtaacgttttattttgatatgtaatattgataaattacttatttagaaatctatatttttattataccccctataggtatattaaatcaatatttttttaataaataaatgtattagttatatttatttgtatttaatagaaaagtatactcataattaaatgtatatataaaaatagagcatctaaattgtttaatgcttatacaatttagatgctctatttattataatttatattttatttaaaatttattctttacatgcttcaaaaaactctgcttctgtttcctttatttcaagctcattgtctattattccaacagcttcttttttaaatgctctacactgacctatacaaccagtctttacattttcttctccaaccaaagtttttagcttatttacatccacatttgaacagtttggacatactcttatcatatttaagttcctcctaattaatgtctaattaatacttttatacccaaatataaactttataaaagtttttttaatataaattattaccatatataccatttatatcctattgtgagtattacatattaattttatatattattaatactacatgtacggtggtatctgttgttttctcactatttccaattccttaatttctaaagacttaatcacatttactttatagttttctttagactttatatacaaaacatcttctatctttttaccttcaataaatttatgagaccacttaagaagttcttcaaaattacaaacttcttcttttataaaagtatcactttcacttgcaaaatatttaattattattttggttacttccaacatatatcatcctttactcttttattaatctttttatctattaagattattatttgtctaaaaaatttttttaaacagaataattttcagatgcaaaactaacagttttatccaatttaaactatattaatacaatttaatatattcctccttgtacctaataatatattgtgctataattaataagttattttaatcgaagggagcaacaaaaatgtcacaaaaacataaaattataaatatcgcagttatagcccacgttgacgctggaaaatcaacattggttgatgctttcctttctcaaagcggtgtttttagaaagaacgaagtagttaaagactgcgttatggacagtaacgaccttgaaaaagaaagaggcataactatatattcaaaaaactgtgcaataaactatgaagattacaaaataaacatagttgatactccaggacacagtgacttttcttctgaagttgaacgtgttatgaaaactgttgacacagttattctattagttgatgctagtgaaggcccaatgcctcaaactagattcgttttacaaaaatctttagagttcggtttaaaaccaatattatttataaacaagattgataaaaaagaccagagagcggaagaagtagttaatgaagttttcgatttatttgtagacttaaatgcaacagatgagcaatgcgaatttcctataatatatggtattgctaaacaaggtattgctaaacttgaaatggatgatgatagtgaagacctttctcctctatttaaaactattgtaaatcacgttgaagcttatcctaattacgataatgaacctctacaattccaaatatcagctcttgcatatgatgattatgtaggtagacttggtataggtagaatttacaaaggtactcttaaaaacaatacacaagttgctatatgtagagaagattctgttgtatctaaaggaaaagtatcaaaactttctgtgtatgaaggtttaaaacaagttgaagttgatgaagctactagtggagaaatagttgttatagctggtattcctgatatatctataggtgaaactatatgcgatttagatagtccactacctatggaaatgataaaaatagaagagcctactctttctatgaacttcttagtaaacgactctccattcgttggaaaaagtggaaaattcgttacaactagacatttgaaagatagacttgaaaaggaacttgaagtaaatgttggtcttaaagttgaacctcttgatactactgatggatacaaagtttctggacgtggagagcttcacttatctatactacttgaaaatatgagacgtgaaggttatgaagttggtgtttctaaacctgaagttttaatgcataaagaagatggaaaactaatggaaccaatagaaagagttgttgtaaactgtcctgaagtttactctggtactattataaatgaattaaacatgagaaaaggtatgatggagtctatgtcaatagaaggagactatgtaaaaatagagttcttagcacctactcgtggtcttttaggatatcgaagtgaatttataaacgctactcgtggagaaggtactttagttcgttcatttgaaaaatttgaagaatttaaaggagaaataccttcaagaggaaatggtgttttaatagcacaaggacctggtgttactatggggtattctcttaatgccttaagtgatagagctgtaatgtttgtagaccctggtgtagaagtttacgaaggtatgataattggtatgaattccagaaaagatgatatggtagtcaacccttgtaaaaacaagaaaatgagtaacgtacgtgcttctggttcagatgatgctataaaattatctcctcctagaatatttactcttgaagaagcactagagtttatagaagatgatgaattagttgaaattacacctgattctataagacttagaaaaagattcttaaatgaacatgatagattaagatataacaaatctagacaaggtaaataaaacgtacatttacctctaattaacaaaatagccatatagtactgaaaaattatttcagtttatatggctatttttatttgaaatttatattattcaacatttatataattagctgcttgaacggctgcaatagctccatctgatgctgctgttattatttgacgtaaaaacttagttctactatctcctgctacatatacaccttctactgatgttgtacaagactcatctgaaattatatatccaccttcatccaaatcaagaacattttcaaacattttattattaggtttaagacctatagcaataaaaataccactaacatctatagttcttttttcttcagtctttaagttttttacttctattttcgatacagtcttttctccttctattttttctacaccatgactgtaaagtatctcaatattctctcttgctttcacagatttctccaacacttcttcacctctaaaactatctcttctgtgaattaaatacacttttgtacaattattagctaaaaataaagcatcttctagtgcagtatttcctccacctactatagcaacttctttatctttaaaaaaggctccatcacatgttgcacagtaagatactcctctacctgtaaattcttgttcccctgcacaacctaatttacgtctttcaactccatttgcaagaataacagcctttgctttatgttcacctgaagaagtttttacaacctttacttttccctctaaatttatctcttcaacctcatcaaactgaatatcaacaccttgagcaactgcttgattgtatatattattagaaaattctaccccagaaatcttttgaactgctggataattttctacctcagaggtacttgcaacttgacctccataaatatttttttcaaatactgtaacgcttaaccctgctctcatagcataaattgctgaagttaaacctgctggtccagcaccaattacaatgatatctaccataatgtttacctctctttatattattatttcttatatattattctcatcattcttatactttactattattatccatatatactacaaacaaaacattattttttattaattaactttattttacatatatataaaaaaactgcaaataaaaattaacttttatttacagttctcacttatttatataattcaaaaccttattggttatcatttacagtgtcttctaatatattgctttctgatatatatgatagaattgaaagtccatacataaccaaaactaatgctgctgttataagtactattcccatatttaatacctccttttgtttacagtatactattattatgtgaaatatttatgaatttaatttgaatatatatgtaatttcacactaacaatttcttcaaattaaacattattaactatatacttttgttgaaccaattatgattaatagtttaaatattagcactatttacttatatttatatgatataccatataattacatttttcaaattaaagttttgtaaactttttttgtaatatagtgtagtataaaattgtaatattacagatatttaatagttatcttttgattactttcattaaaaacagcttcatcactatgaaaatctaggtttttaaacttttaaaaaagttaaaaaaatatttttctaatactcaatttgattacaatttttttacaatttaaaaaatattttttccaaatttttatattaatacttgactttgtctgttttataaactagaataattaataatattaagaatattgaaaggcattgattaggaagagtaaatctgaatcgattaccagagaaggaaactactagctgaaatgtttccctaattagaaggattgaaaactacctaggagcttctatccgaagttatcttaatgattttagtaggaatagacgtttttattacttgcgttaaagtatcaagtggattttttaaaatcaatttgggtggaaccgcgggaaacagattctcgtcccttttttagggatgagggtctttttttattacctaaattcggtttttaaaatattctgtatctaatttaattagctaattaaaaatttaaaatatatggaggattataaaaaatgtattattcaagtacgagaggcaccgaagaaaaagtaactgcatcacaagcaataataaaaggaatatcaagtgatggtggtctttatgttccaagtgaatttcccaatgtaaaaaatgaacttataaatttagtaaatttaacgtattctcagatagcattttttgtacttagtaaatttttatgtgattttactgaagatgaaattaaaaattgtatagaaaatgcatatgatgaaaagtttgattgtagtagtatagctccattaaataaagtaaatgatacttatttcttagaactatatcacggtccaactttagcatttaaagatatggcacttactataatgcctcatcttcttaaaacatctataaagaaagataatttagagaaagatgttgtgattcttactgctacatctggagatacaggcaaagctgcacttgagggatttaaagatatagataaaataaagataattgtattcttcccagaagatggtgtaagcccagtacaaaaacttcaaatgaaaactcaaactggaaaaaatacatatgtagttggtataaaaggaaattttgatgatgcacaatcaggtgtaaagaagattttttctgataaaaaatttaatcaaaaactattggataataattatatattatcttctgcaaattcaattaatataggaagacttcttccacaagttgcatactatttttattcatatatgaaattagttagcaatagtgagataaatttaaatgataaaataaattttgttgtcccaactggtaattttggtaatattctagctggatattatgccaaacaaatgggtcttccaataaacaaattgatatgtgcatcaaatgataataatgttctttatgatttctttaaaactggtgtatatgataaaaatagaacattgaaattaactacttctccttctatggatatattaatttcaagtaatttagaacgattactgtttgaaatatcaaatagaaatactgatattgtaaataagctgttatcagaccttagtgataaaggagtctacaaaataagtgatgatatggaaaaaaatttagcctcattctatggagaatattcaaatgaagaagaagttaaaagcacgataaacaatgtgtttaaaaattataattatttgatagatactcatactgctgttgcatacaattgttatgaaaaatataaaaaagaaacttctgataacacaaaaactgttattgtaagtactgcaagtccattcaagttttctgaagatgttctaaagtctatagattgtgattttaaagaccttgatgactttgctataattgatagattatcaagtatttctaaaatagatattccaaaacctattaaaaatcttaaaaatgcagaaatactacataaagatatttatgaaaaagatgaattaaaactagctataaaaaaattcttaaaggtataggtgattattatgttagagattatagttcctgcaacaagtgctaatataggtccaggatttgattgtcttggaattgcgttaaatatatacaataaattttatgttgaagaaattgaaagtggtcttgaaatagaaggttgtgaagatgcttacaaaaacgaaaataacttagtttatacatctatgaagtacttttttgatagagttaaaccagaaaaaatacctgctggtatcaaaataaaaatccacagtgaagtacctatatgtagaggtcttggcagtagtgcctcttgtatagtagctggagttatagctgcaaatgctctatcaggtgctaatttagataaaaatcaattattaaatatagcttcagaaatagaaggtcacccagataatgttgctcctgctattttaggaaatatgatcgtatctgttactgataatgagaatatacattatgatattataaaaattcctgaagaacttaaattttgtgcaatgatacctaattttaagttatcaacagaaaaagctagaggtgttttaccaaaggaaataccatattctgatggggtattcaatgttagtagagttgctttactaatatctgccttactaaacaaaaactttgacctacttaaagtagcttgtcaagacaaattgcatcaaaattatagaggaactctaattgagaactacaatgatattgttgaaaaatctgaacaattaaatagtattggagtatttttaagtggagctggacctactataatgtctttaataaaagaaaatgatgatagttttgtggataatatgaaaaattacctacaaaaactaaaatctgattgggaaataaaagagttatgttgcgattctaatggagctgttttaaatataatataattatcgtcttctatacaaaatataactactcttttattataatttgtagtataataattaggactaggtaataatattaagtattataatctagttctttaaacatgtttacattgaggagggattatcataaaagagttaataattagagatttagttgcaaaagttcctataattcaaggtggaatgggcgttggtatatctaggtcatcactagctggtgcagttgctaagcttggtggtgttggtgtaatttctggagttcaaattggatatgatgaggaagattttgaaactaatactataaatgcaaatttaagagctataaaaaaacatatttctaaggccaaagaaatctcaaatggtggtattattggtattaattttatggtagctatgaaagaatatgaaacatacgtaaaggaagctgttaaagctggtgtagaccttataatatctggagctggattacctaataagctaccatcattagtaaagggaagtaatgtaaaaatagcacccatagtttcaactgcaaaagctgctaatgtaattttaaaaatgtgggatagaaaagagaaaactactgctgacttaatagttgttgaaggtccaaaagctggtggtcaccttggatactctaacgaggaacttgataacatagattctatagactatgataaggaatttgttgaaattttaaaggttgcaaatacttatggagaaaaatttggtagaaacataccagtagttgctgctggtggtataacttctagtagtgatgttaaaaaatatatagatatgggtgcaagtggtgtacaagttggtacaagatttgttgctacttacgaatgtgatgcccatgagaactttaaaatggcatacataaatgctagtgaagaagatgttcatatagttaaaagtcctgtaggtcttcctggacgcgccataagaaacaaatttatagaagaagttaaaataaatcgtccagaaataaagaagtgctataattgtttgattccttgtaatccaaaagaaactccttactgtatttctcaagctctaatcaatgcagttaaaggagatgttgaaaattcacttttattttgtggaaatgatgcctataaaattgataaattaagtactgttgaagatgttatcaatgaattgatttctgaattataatttaaagaaaactaaattaaaattttatcaagctaaggagttttaatacgttatttattaatctttataaacatatttatgtccttagcttttttgtgtcaatttccttttattgaaattttaatttaattagagatagtattaacccttataactaatcttcttttacaagtacattggttatttcagctatatataaagtatgataatctttttgtggataccatcttccatctataccttcagcaataaaacattggggttcaagtttctgactataaatttttttgcatataatagccattttagcttccttaaaataaggtgtatcatttaagtgttctatattaaatccaatctgtgatatcttatcctcttctctaccagatacctttccacaatatgaaagctctttacgaaaatcttcatcaaaaaatgtaagagaaaatttatctgtattatctataaattccttagtataacgctgtggtcttattactacaaaagcaacatcttttccccacataactccaagtcctccccagctagcagtcattgtattcactttaccttcattttctgctgttataagtgtccaatctttacctatcaatccaaatggattatttttaatctcttctgccaaaatttctttaaaatcactcatatctctaataacctctcattctcttatatttatattccttttattttcgtgataaattataaatgaagtctagttttgaaaataaaatacttttttaaatatattattgcaaataagtaaatatatatatacactcttattttttaatatatttaataatttcactcagaatatatatattctttactcaaattaaatataacttatatactttatgtgtaaattatggtaaaaatattatttaatcaaatcaaaacttgatttatatacctggaaaaggtattatattaaagagtgcttaaaatacgcatttcataaatagctatatataaaataataaataaggagagtgatgggcaatggatactagtccgttgcggagagaattttttacattttcatcacttaataatatctaaaatcaaaactaatacatatattcagttatataaattagttaattaatagatactattaaatgatgagatttatataaaactgaataaaggatgtgttgccatgataagatattacaaaactatagattcaaaattagagaaacttagtttttttgaagatggctgttggataaatcttgttgaacctaatcatagtgaaatcaacgaaatttctaatttattaaatatagatgtagaaagcatagaatctgcactagatgaagaagaacgctcaagaatagatgttgaagacaatcatactcttatacttatagatataccagtagacgaaagtgactctaattcttctcattatactacaatacccttaggtattatactaactgaagaagctattgtaacagtttgtgatgcacagactaagattttaaatgactttatagttggtcatattaaagatttttttacgtttaaaaagactcgctttttgcttcaaattcttcacaaaaatgcagcttattacttgcattacttaagaaaaataaataaaatgacaatcataatagagcgagaaatttacaaatcaatgaaaaacaaagaattggttcaattattggaattagaaaaatctttggtatacttctctacctcactaaaatctaatgaacttgttttaaacaaaatggttagaactgctggtataaagaagtatccagatgatgaagacctattagaagatgttatagttgaaaatagacaggctcttgatatggctaaaatatatggagatatattgagtagaattatggatgctttcagtgcaattataagtaataatcagaataatgttatgcaaattttaacagtagttacactaattttctcaatacctacaataatatcaggattctttggtatgaatgtcatcaacatgccattttctaataacccaaacggattttggataatacttcttattacctctataatatgtatagtgattacatttttcatgtcaagaaataagctattataaaatattaataaaaaagccattagaattaattgatttacatttatcctaatggcttttatatatttaaatctatataatcttataatactttttaactatcatgttcttcatctataatcatttcagtttcaagcccttctagcattgaatctaaactttcttttatatttagtatataaattggtacatactcttcttcatctattacctcttcttgcaacttaaatggaggaattaatacttcatcaaagtctatatttaaattgggaaagccttctactatctcttcacaattatcgtactcttcatttgctaaagaaatgtacatatctaggctctttttataataaagacctgcaagcatatactcacacttcttacttccatatttaataccttctttataatatttctcagcttctgcgtcatcatttaattttaaataaatttggcctaaattatatattgattcaacacaaccttgtgctctagccttttcataccaaaatttagaatttacataatctttatagaacatatcataaattaatcctaccatatgttgagcgtacacattattttcattggcaggtgtatcaaacatcattttagactcttccaatttaccttctctaaaataaattctacctagatgtatacgagcattcatatgatttttgctacttgccatttcaaaatactttctagcattttttgtatttcctaagctctcatatatacaccccaatctataactagacctcgtatctccattttcagatgctttcttataccaacttatggcttcttcaatattatttaaatcttcatagatatttcctaatttgatttgacaagatgcattatttggaatcctcgaataatacgaaatcgctttttctatatcttgattctgataatataaatccccaagattttcaagggaacttttgcatccaacagctatagcatcctcataatatttaatagcattttcataatctttttcttcaaaatatatacctgccagattattttttgcttctgttatatcatcttcagcagccattttataataagtttttgccttctctatctcattttctctattatataaattagcaagtctatacttagaaagtgtatgatttttttctattgctttctcataataataaattgcatctcccagctcttcttttctatcatatacatatgcaagcctatactcagacttcacatcatctctatcagcactctttttataatacttctctgcatcttctaaattatcatttatttccataatcatacccaagttaaagcaacctttcatatgacctgacttgtacaactgtttatataaacttactgttgatttattatctttcttttttccatttaatattgctaaattatattttgcatcatcatctaaaagcacagaaccttttttatagtattcatatgcttcatcatctttctccaaaaaagtatataatacccctaaattaaaacaagctttacctaaattcttgtctgctgctgtttttaaccatttttcacaccttacaaaatctttcattttaaaatggcatacacctaaattattttgtgcttgtaaataacctaaatttgctatcttttcataccaatatatagcatattcatagccatctaacttatagtacatattacctaaatcaaaagcagcatcttcacttccacttttatatgccattgaataccacttttctgcttctttaaattgttttttactttcatatatatttcctaaagtatattgagattttacgtaattatccaatgcagcactcttatacaactctattgcgctttccatcttacccatcttttcaaggagggcacccttagtatgtacgactttcaggtcattagatatattttttattttttttatagaaaattttgtatttttcattattcgctacctacccattttataaaatatattctctcaaacattattatacattataatctataattaatgctataatattgaatttttaccttttgtcactatattgtaacattaaattttaaattttataatcattagattttattatgtaattggtatataatgtatatatagggggggacattttatgaatttcagcaatatttttatccaagttgcagttttatttataattattttagttggatattttgtcagaaaattcaacttattagatgaccactgcacatctaagctttcaactttgacaatgacagtttttttaccatcaatgataattagctccatgcaaattaactttgatagtaaaatgatacaaaaaatactattgttattatttacatctttgattatgtatatagtttcaattataattgcatttttattgaaatacattttaaaatgtaatgataaaaaagatttgggaatatatcagtatatagttgttttttcaaatgttgcttttatgggttatcctgtaattgaagcagttttaggtcatgaagcaatattctatactgcaatattcaatttgccttttaacttattttctttcactttaggaatttatcttttatctaaaggcagtacaagtagaggtttttcaataaaatcacttataagccctgctacaatagctattgttattggactttttttatttgtaacaggacttaggttaccccaatttataaacgagccacttgagatgttgggaagtataactacaccaatatccatgattatcattggaagcttacttgctaattcttcagctctcgattgttttgtcaacaaaaaattatatatagtcacttttataagattattggtacttcctgtgattgtgtattttattctaaaaggatggataaatgataagatgattttagctataccagtagtaatttcttcaatgcctgctgctgcaaatactgctataatggctaatcaatatgactccaatataacactagcttcacaatgtgtgttttttacaacactattttcagttatatctataccttttataagtattttactcttatcttgatttatttttttatgtattatataataacatattcaataaattacaaatataaacattttattgtagtatattgatggaattttttcctagatatttgtcaataatatctatatgtattatagaataggaggcttaaatatggatatggatttactctttaaaatagtatttgctatagttgctataggtgtttctgtaaaaatcattaaaactgttgctagtttagcttttaaaatagcgttgatattgctaataattttatttgtatatagaatgtttttgtaaacatttaaaaataagttttttaatacaatagagaagtaaaatagattatttttaatgtaaattttttattaaagacactctattttacttctctattagcttctttaaattaaatttttattatatcttcccataatataaacatcttcaaattttccatctctgattacagcatattttttagttccctctatttcaaaacctagttttttatataaatttaatcccttttcattatctacaattacttctaatcctactctagttaacataatccaattatctgctatatctaaaagttgttccataagcttcttacctactcctcttccctgataattctctgcaacacttattcctatttctgcactatgtctcaatcgtggagaagaatttacatgtaacccagcaaaacctattacatctttttctccattattattagtttcagctacaaacatataatcattttctcccaaagaagctaacatagcttcagttttatcgactctgtcactcattaatgccaaagtatttctcataacactgtatgttcttctaatttcattaaaagcttgtgcatcttctcttcttataggtcttattgttatatctataggcttactcatattggattccccctcaaacataatctttatttttaattaaaattttacatctttattttatactgttcaaatctatgtatgcttctacctgaggtacatatatcatattatcttttatatgtgtacttccaaattcttttaattctgtaccttctttatccttagttattttatatctaatggattccataccttcaactacttcagcatgaaaaaacataccttcatattgtttaaatctaaaattaaaattgtctttagtaagttttattatcatatttttatctactccttatataattgatatttttcttattattagttgtatatatactgcttattcatattaatatattataacttatcatttatttagtataaagttataaatagatatatttatacttattttacaatctttcttcaattgatatataatatgtttatataaactaatgtatgtgaggtgaaatatgagcaaaaaaacaaaatatttttctttaattctctttcctattgctttacttttaaattttatagccagcaaagttccaaatattgttgaaaaatattactcccaattcatagataaaataattgtacaaatattgagtaaagtttctggaattttcccattttctctctatgagattacaatgtacataatagttatatctatcttcttatttttatgttgtactttatctacaatttttaataagaaaaaaaattaaacatatttttaaaaaattccattttaaatatattatccattgtatcaatagtctactttctttttgtagtgctttggggaataaactataataggattccactagaaaccacacttataaataactataatttaaaaaacaatacctctatccaatcaaaacaatatagtgttaaagagcttactaaattatataaattccttgtaattaaagcaaatgaaactagaaaactcacattacaagataaaaatggtattgtaaaatctaatacagattataatggtgtcataaatagagctcaactaggatacgataatatcttggatatattacctagtgttagtggtagttattctaagcctaagtatattatttcatcaaatctaatgtgctatacaggaataactggtatatactttccttttacaggtgaggcaaatgtaaatatagcaatacctgacttatatattccttgtacagttgaacatgaaatagcacatcaaaggggatttgctagtgaagatgaggctaattttatagcgtatcttacttctataaaacacccccatattgattttaactattctggatatattttagctttaaattatactgcttctgctttaagtaaggttgattataatgcatatgttgatatttctgctggcatttcagattctgtccgtagagatttaaaaaatgaaagtgaattttggcaaaaatatgaaggtaaaattaatgaaatttctaatgagtttaacaattcttacttaaaagctaatggcgttactgaaggtactcagagttatggtaaaatggttgatttattgctaacttattatgaattatatccatataactaaacactacaattcaaaattttattcatatacagctgatattaaatcagctgttttctatttaaataaattatttaacttcaagcaatcttatataatttgatagtacttatactatctgtataacatttcaattctaactattttagttaaaacatttctattatcttttttaataaatgttttaactaaaatttttaaaacataaaacttccacattatttcactatctatataaaaatctaaaaattcacatataaaattacataactaaaaaatcataaatttatagaaaacatatattcaaaataaaaaagcatgtatcaaaacttgacacatgcttttttattttgaatatataccattttgtcacaataaaaatttccttgtaacactgatatttttaaacaaaatagtccttatttaattaaattaacattaattaaattcgtactcattttgctatcattaaacattacttatagtaattttctaatacactatttgaaacttccttcccttgaaaacttttcaaccaattctcatatgctgaatttttccatatactaccatcattaaatgttacttgttttacacaagatataatgtactttacaccatgctctccagttgattgtttccatttatcaaacaatagaaaggcatcattttgattcttacctggtgctattgcattttgctttgcatattctttctccatttgtttccattctttcaaccaattttctacccatgccttgccttgttgtttttcaaacatacttattatatcctgtggtggtgattgttgcatttttctataagtatgtgaatatgattttggagacacaggagatatgcctgtaacaataccatagtctacaccagctgggctaaatccaacacttcctacttcgccatctgctgccacattttgagcatcccaatatagctcaagtggttttccatttttatcatatgctaagcatgtaatctcataatccataattgccttttcactgctatttgttaagcttataacattgctaggccaatgatatggagtatcatcatactgtattttgctattatttataaataatggaatattctcattataaacaagacctttactactttgaatatcggatactttctttgtgacagtacttaccgtacttgctaagtatacatttgttttttctgaattggtcgtactaagagaaaatgttgttgtcgttccagtaatcagcaaagcaacaactaaaataggtaagctagatatttttttatatctcacagttcttcacctctttttctattaacttataataaaacaatttaccaaaacattaaaatctatgttaacataatttaccaactgttctagtaactatatcctatcatagttactatcaagtttcaatactattgatggaaattttcactatattaaatctttttttaattttataaatttacaatatgatttaactcatacatatatagtcaaattagaatataagtttcttacatttaatgaagtttataaaataaaaaatgactagataattaaatactgtaaataaaaacttattacaaaagtatttaaaaatctagtcaattaatatatatatgaattgtatactataatttttcaatctcttctagcaactcatcaactaatttgttaccatcaatcattctaactatttcaccctttttaaataaaagaccttcacctttacccccagcaatacctatatctgcttctctggcttcaccaggtccatttacagcacagcccataattgcaacagtgatatttttttccatactaccaatcttttcttcaacctcatttacaacactaattaagtctatattacatctaccacatgtagggcatgatataactttaatcttatcatttaaaagtcccaaacttcttaaaatctgtttaccaacaataacctcttcaacagggtcgcctgttaaagatattctaacagtatctccaattcctttaagaagaagtgctcctacccctatagaagactttattgttcctttgtgaacacttccagattctgtaattccaatatgaagaggataatcaactttttttgatattaattcatatgcatcaacagttttataaatatcggatgattttagagatataactatattatgaaaatctaagtcttcaagaatcttaatatgtcccattgcactttcaactaatgcttcagcagttgcagagccatgcttttttaaaagttctttctctaaagaacctccattgactccaattctaatttttaaatttctttccttacatttctcaactaccatcttaactctctctctacttccaatattaccaggatttattcttattccatccacaccttgttctatagcttcaagggctagcttataatcgaaatgtatatctgcaataattggtatatttacactagactttatctttgctatattcttagcagctttaatatcaggaacagcaactctaactatatcacaaccagcttcctctagtctctttatttgagctattgtagcatctgcatctcttgtatcagtatttgtcatagattgtatacttataggattttctcctcctatttttacagttcctacacttacttctctcgtctttcttctctcgtaactcatattccacctctatatattattttatattgaatctctttaaatagtaaaatattataacctacatgtatattataaattaaaaagctatctagttaaataagaataaatttcatacataaaaattaatttattcttatttaaaactacatagcctattttcttaaaatctctaaaaaactaaatcattgaaataatcttaatatatctttatatgtgataaaaagcataaataacattaaagctccaaaaccaacaacatttatcatgccttctttgtttgggtcgagttttttaccacctctaacagcttctagtaatagcataagtattctccatccatcaagtgctggtattggtaatagatttactatacctaaatttaagcttatgacagctgctaaatacactacatttatgatgcctgtacgagcagcatctgataccataccaataacacctactggtcctgctacagcattgccaatccctcctggtacacgtcctgtaatcatttgacctagaaatgttaacatctgttttgtcatatctacagtagttttacatgcatttactattgacgccaaaaagtctttttctctttgtggttgaatccctatttcatactttccattgttatttttaggtgttacatttacaactttattacttccatctctagttatactaagttttaattctccaccagaagaagtgtttattatatttgcaacttcatcccaagtcttaacagaattaccattaattttatttatcttatctcctacttgaagccctacagcctgtgcaggagtatctggcattatctttcctaatttagtcgttggagaacctatatacaaaaatactggaactaaaagtattgctgctaatattatattgaatattggtcctgctacaatagtactaaatctttgtaatatagacttgtttccaaaagaatttggacttatttgttcttcatcttcaccttccatgctgacatatccaccaattggaagtgctcttatagaatactctgtatctttttttacactatatatcttaggccccatacctatagaaaactcatttactttgataccacttctttttgcaaatataaaatgtcctaactcatgtattaatacaattatactaaatagtattaatgcggctattatagtcataaattcaccttcctatttttttatcagatttgcaacataagctctactccatctatctgtttctaagatttcttctaatgttggttcgcttatgctactatgaacttctaaagtcttctctatgtaatatggtatgtcataaaaaccaattttatcctctaaaaattcacttactaaaacttcatttgctgaatttaaaacagaagaataagttcctcccatttttaaacactcataggccaattttaaacatggaaaagtttctaaatctggttcttcaaaagttaaagtactaaattttgaaaaattcattctttcaaagctactttccattctatctggatatgtaagagcatactgtattggtagtctcatatctggacaccctaattgagcaattattgagctatctgcatactgcaccattgaatgaattatgctttgtgggtgaactactacatctatattttcttgttctaccctaaacaaccatctagcttctatcacttcaagtcctttattcataagcgttgaagaatcaatacttatttttcttcccatactccaatttggatgcttcaaagcttcatttttagttatatttacaagttctccctttttctttcctctaaatggaccaccagatgctgtaagtattatcttttctatattttttttattttctccatttagacattgaaatatagcactatgttcactatcaacaggaagaatatttacattgtatttttctgcttctttcattacaagttcaccagcagttaccaacgtttctttattcgctaatgctatgtctattcccttctttatagcacaaagagttgggactaatcctatcatacctactacagcagttaaaaggacatccacttcatcaagtgatgatattatttttaatccttccattcctgctaaaacttctatttctatatttttaggcaacatttcttttaatttcaatgccttattttcctcaaaaactgttacatatttaggtttaaactctactatttgttctagcaataattcaatattactgttagctgatattgcaactatctcaaacttatctctatgttctctaaccacatccaaagtttgtttacctatagagcctgtagaacctaaaattgatatctttttcatataataatcctttctaataataaatataccctgtcaaaacattataacactactaaaacaattatttttactattcatagaaatttcatatattattccacagattaaaattaatctattattttttgtatcttgtggaatattataaaatattctagtattattaaatgcccttttttatttccacaacatcttctattttacagtctagtgctaaacatatcttctccattgtatccatagaaacagatttatcatttcctagtctgcctaaaacagaaatacttatacctgatatatttacaaattccattttctttatttttctgtcaattaacaatttccataatggagcgtatgaaatcatgttatcacctcgcaaaatatattctatcacattttatctattttggaaaattttcatctatttagataaataattatttatctaaatagatttcaattatagtttattaaatataaatatgttaaaataaaacaaaaccataagttcaaaaattaagctttatatatatttatctcattattttactaaaacataactatataaaaaatatttactattatatatctatttaaaacacatcattatagtatcatataaacatatgtaaatatataattaaaaaagctaaaaattagtaaatttataaaaattatattttgaataaaaggagaaagaatgttgtatttattaaaaattaatcaatttgaaagaagctatgatataggaatttttaaaaatgaacaatcaatatataaatttattgaaaaaataccctttgtaaaaaaagataatagtaattttaattatacaaattactatatggaatttgaagatattcctgaatattatgaagtaaatttcaataattatttatatattattaccaggttttcattcattccagatggaactgagatattttttacttgggaagaaatccattattgggatgaaaaagttgctaccgagaaaacttttataaatggcgaaacattagtggattcatataactttccaaataatgaagtgaaagactacatacaaaagcgagaatcattatatatagaaacaaaaaaatattatgaagaaaaaggattaaaaattgagagacatgcactcggttcagaagatggtgaatatgttgaacttacaaatgattctatactttatttactagatatagaagcagttgaaataagagaacaatcaaaaaatatagaagaatttctatataagtacaaaaaacgttttaaataatttatattttaaaatacataacaatacattgagtcatttaacgaaatataaaatgactcaatgtatagactgataaaaataattatattattttttagttacatatttgttaaaaaattctttttcttctatcggtttagagaaataaaacccttgtcctacatcacatttaactgtatttaaaaattccaagtcttttttagtttcaataccttcacatacaacagacatgcctatacgatgtgacatttcaataatacactgaataatactatatactttctcccggttaaatgtttctttaagtaagcttttatctaacttcaatccattaatagatagagaacataaaagacttaatgaagagtatcctgatccaaaatcatccatcgaaattaaaaatcctaactttttaagctcctctaaaatcgaaataactggttgagatatttcattaaaagcactttcagttacctctatctctatatacttaaaaggaatttcatattctttaacagtatctaaaaacctttgataaaagctattttggtaaatagtaacccttgaaaaattaactgcaatcggatatgtatattgattttttttcataaacgttttttttacaaatgaacacgctttttttaacatataaaagtccaattcaataataaatccacttttttcaaacaatggaataaattcatctggtgataaaaaaccaagttctggagaaaaccatcttacaagagcttctgcgcttacaacatttaaagaagatatttgaaatttaggttgcaaatacatatgaaattcttcattttctatcgctttatacatataattataaatactattttccatttgtaactgttttaacagattttcattataccatactgtggaggaaattcctcttgttttacttaccttgtgtgcaatatttgccttatccattatagaattgatggatttataacctaaattatcaatttcaactaagtacgctcctatacaataagatatagtttgagttacattcatatctaattcagagattatagcattagttagcatttcccgaatatcctctaaaagagaatctctatattttgcaagtattacaaaattatctgaaccaattcttgcacaagtttctttgatattaaaagttttagaaagtgcagctgcaactattattagaactttatctccatattcatatccatgtgtatcattaatatatttaaaattgtcaatatcaatatttagcagtacatactctttgttagatgcattgtacaaaatttcaatcgctctgttttcaaatgcaacctgattttttatttttgttaaattatcagtataaaatattcttttaaacctttttttattataatattcccaaattaaaagacttattgttgagaatataagataaataaatagtgcagtagcaaaagaatacaattttgcattagagtgtttttcagatataaaaacaatttgattagacaacacagaatactcttcactcaatttatataatttatcacctgaagcaccatttctaacttttataatttctttcttcatagattcccacatagaatccatttgatttagtttttgttgaaattctttattatcacatctttgaaatccattttctccattacctgttcttagctttatcagaatattatccagtcgttttatcaagtcatcatttctttcattattcaattcttgcttaacaaccttttgagtttcactgcgaatagtaccagtgtgacttataattttaatatgctctatactatgatatagagaaaatataaaaaaaataataataactagccaaatagcagaataaattaaaaaatcatattttttcttcattattgttacctcatttgtaatatatataatttgcaaataatcaatctcttataaaaaatgattatcaatattttacagtgatatgtatttatcttaagtagtttaatcatttataccctataaattatacaaattcatcacctccaacacaaacagcaatatacgtttttctaaaatttctttttaaacattcatcaacactatcattaaatcatttttaaattgctcaattaatttactgcatcacttcttttcttataaaatatcaccccaataatatatttgtataatgtctttatgtctctttttaaatttggcatatacataatctatattttaataaataattaaaatactatttacctacaatttaactctttgaatttattttatcatattatgtaaatatattccttttttttggtatattacttaaattatatctatttttgtgcaataagaccaataatttacttatttcttattaattatatttaaaaataaaatttataaatggataataaattagttacatttatacatatatattataaatatataataaagctaaaaatatcgaaattattaaacaaaaaaatattttttaatgatagttatagtataaaaaatatactcactacaaatatagtatactattataaagtaatacttattcttataaaattccccaaggtcttctaaatttttgaacaatgaaaatagccatgtaactaataactgcagaatatctctgcatttaaaagttacatagctattttcattactagcaattatagattgctcttttaaatccaaccaatctttatctaataaaaaatttaatcgcactatatacaaaaggtgcaactaatataacactatcaaatctatctaatatacccccatgaccaggtattatctttccataatcctttatccctacatatctctttatagaagatgcaaataaatctcctaattgagctattacacttcctatacttcctattatcgctaattgaagcaaatcaatgccaaataaatatccaaataaaatacaacaaagtgtacttcctattattcctccaatagctccttctatagtctttttaggactaactttaggaattagcttatgttttccaagtaaataaccactaaaatatgcaaatatatctgtcataaaagatatcacaaatataagccatacatatatactacctttttcaaatccatttatagttataattataaaatctaaaaatactcctatataaaaaactcctaaaaacgtaatcgaaacatctataacattgtttttgcccatcaacatataaattatacttgctaaaaataaaataaaaattactgcataagtatattctaatggtaaattaaaaatattttttacagctaaataaatagaaaataaatatcctataatgaatattggatgtacatcttttattttaaatgccttataaaactcatgcaatgcaatataaactattgctgtctcagctatatatagaggaatacctccatatacaacaaatagaaataatggaaccagagctagtgaagcaataattcttgtaagcataaaataatctccttacttaagtcctccaaatcttctatcccttctttgatatacgtatatagccttctgtagttcttcttttttaaaatcaggccaatgtatatcagtaaagtaaaactcagaataagcaacttcccaaagtaaaaagttactcaatctttgttcaccacttgttcttattaccaagtctggatctggtatagactttgtgcttaaatagttttttataatatcttcatcaatattgtttatatctattttaccactttcacaattttttactatatctataagagcattttttatatctgctctacttccgtagtttaatgctaaatttaagttaactcctgtattgttttttgtcagttccttagctgagtttaattctcttatacaagtttttggtaaagcacttatatctcctatagcagttacttttacattgttttggtgaagttcagctatttcatttcttaagtatgtagataataagttcataagtgtgtcaacttcaagtttcggtcttttccagttttctgttgaaaatgcatataatgttaagtgcttaacacctaattttgagcattcttttactatatctcttatagtttctactccagccttatgtcctgcagttcttggaagaaatctagcttttgcccatcttccatttccatccattataatagcaatatgagtaggtatgttatttaagtctatatcatatataatgttgttattcatattttgcctccaatattgttctgactccttaaactaaggagtcagaaaagtatgtgattatcagttctacactatcacctatctcagatatttttataactctaggaactacaagtttttctttatcctttttaccttcaatagattttacggtataatttatattttgctcatcaaaatattgttttacctcatctacatgaagacctaaaaggttataatattttttcaatattatacctccattatgtccttttcttttttagataataatgtatctatttcttttataaatttatcagtcattttttgaacttcatcttgtgctttttttaattcatcttcagttaattctccgcctttttccatctttttaattttctcattggcgtctcttctttcatttcttattctaactttaaattcttctgcagctttactagcttttttagctaattcttttcttctttcttctgttaaagcaggtacagaaagtcttataacctcaccatcgtttgatggatttaatcctaagtctgagttagctatcgctttttctatttcatgcatagcagatttatcccaaggagatatcattaatattcttggttctggtacagatatagcacctatttgatttattggagttggagttccataataatcaactcttattttgtctagcatttgtgcattagctcttcctgctcttatagttccaaattcaaactttaaagcatcaattgtcccattcattttctcttctaattgcttatgtatttccagtttcataattttactcctccttcattcttcattattttacagtagttcctatattttcgccttttactgctcttattatattctctgttgtaagctcaaatacctttattggaattttattatccatacataaagatgtagctgtagaatccattacttttaattctttctgtataacttccatgtaacttaattctgtaaatttcttagcatctgcatgtacttttggatccttgtcatatactgcatcaacatttttagctagcaatataacttctgcttccatctcagcagcacgtaaagcagcagttgtatctgttgtaaagtaagggtttcctgttcctgcaccaaatataacaactctttccttttctaagtgtctaactgctcttcttcttatatatggttctgcaatttgtctcatgtctatagcagtttgaactcttgtagcaacatctatattttctagtgcatcctgtagcgccattgcattcataactgtagctaacattcctatatagtcagcagtagttctatccattccttcactggttctgcctctccagaagtttcctccacctactactacagctacttcaacacctatttcttgtattttttttatagcaatagcaatatcattaactacatcattatttataccaaaacctctttctcctgctaatgcttctccacttaattttaacaatacccttttgtacattggtttatccatcagaaacctcctatttcaatccttcatatccaattttttctattttttaaaaaagagaacacctgcgtgttctctctttggttattacttaagttgcttagcaacttcttctgcaaagttttcttctctcttttgtataccttcaccaacttcgaatctcacaactttaacaacttttatatcagaacctactgccttagcaacatcagcaactaattgtttaacagttatatctggatttttaacgaaagtttgctctaataaacaaacctcttttaattctttttctaatcttcctttaaccattttttcaactatattagctggttttccttcatttaaagcttgttgagttaatacttctgtttcatgtgctatgtattcagcatctacttcatctcttgaaacatacttaggattcatagcagcaacttgcatagctacatctttacctaattctaaaactttagcatctctagcttctgtttccatttcaacaagaacacctatttttccaccaccgtgaatgtatccagcaacttgtccattagttacaactttagcaaatcttctaaagtctaatttctcacctatttttgcaactctattatttaaaacttcttgtaaagttattccctctttatgagtttcacctaataaagaagctatatcttctttatcagtagctaatgccatacaagcagcatctttaacgaacactttgaagtcttcgtttttagcaacgaaatctgtctctgagttaacttctaccatagaagcaactgtattatcatcattcatttctattgcaactagaccttcagcagcaactctaccagcttttttagcagcttttgataatcctttttctcttaataaatctactgctttttccatgtttccttcagcttcttgtaaagctttcttgcagtccatcattcctgcgcctgtactttctcttaactcttttaccatttgagcagttatattagccattttttaagtttcctcctacttattctattccatattataaatggtaagggcgacccttaccatttaattgtcaaattattattcttggtcttcagctacttcttcctcagcaccttgtctaccttcaattacagctgttgccatagcaccagttattaattttacggctcttatagcgtcatcatttcctggtatagcaaagtctaattgttctgggtcacagttagtatcaactataccaactactggtatacctaatctatgagcttcttgaatagctatgttttcttttcttgggtcaactacgaacattgcacctggtaattcaggcatgtcttttattccacctaagtatttttctagtttttctttttcagctcttaattttataacttcttttttaggaagaacattaaatacgccttcttcttccattttttctaattctcttaatttatttattcttgtttttatagttttgtggtttgttaacattccacctaaccatctttcattaacaaagtacattccacatctttcagcttcatcttttatcgcatcttgagcttgttttttagttcctacgaataagattggctttcctgtttcagctacttctttagtgaacttgtaagcttcttcaacttttttaactgttttttgtaagtcgattatatatattccatttctctctgtgaatatatacttagccattttagggttccatcttcttgtttggtgaccaaagtgaacacctgcttctaataattgtttcattgatattactgacatatcttacctcctggttttatacctccagcttgatcttctccctaaaaaaccatgtaataggcaccttttaaggatcccaatgctgtgtgtgatttattttattttttcacctctagtagtatatcacagaggcgaagaaataacaatattttttccatattttctatttttatatttttttgtgtattttataccattttttgaatttaatttgcaaatttcatttttaattttgtttttaatgatacgttatctatactattattacttactatatctacacttccaagtaagtcacctgaactagtataatattttataacacccatagtatcaccttttttaacagggtactctatatttttaatcttaacttctgattttatactttcatcatcttttaatattgtataaagttcatcttttgcttttaatgtaacctctaactctttcattccttttatatatttcttaccaataaagctatctttatcaattacttttttcatattgaaattttcttttccatatttcagtagagctaatgaagcagaggttcttttatttttatggttagtacctaatacaacccctattactctacgttttttctcatttttctcatttttatttacaaccatagaaaatgataagcaatatccagcattgccagtatatccagtttttataccatctacttctggtataattcttaataatgcatttgtattgcttttttcaaaacttctatctgaatttgtatatgtctccatatcagttatagctgttacttgtttttcataatggtcaaacatgtattttccaagaatagctatatcttttgcagtagagatattttcttttgctggttttttggggttgcttaaatcgtatattggaagaccatttggatttagaaaatgtgtattactcattcctatttcttttgcttttttattcattctatctacaaatgcttctttcgttttacaaatatgttttgctatagcaattgccgcatcatttcctgatacaatcataagacctctcataagctctataagtggcacttcttcaccatctttaagtttataacttgacccttttactgatgcaatagatttgtctatttttaccttatcagtttcttttacttctttattttcaatagcttctattgcaagtaaaaaagtcatcatcttacttaaactagctaatggtaccttcatatcaggttctttactatataaaactctacctgtttcttggtctataagtatagatgtttttgaatacttgtctacagatttaccatctgcatatgaataatttggtattataaaaactagaatcatggctaatgatataattttttttagtgcatttttcaaatttttcaccttcttggattattaagtatatttatatttaaattttccctatttggtccaatttatatctagtaattaatacctatccatatttacacaaatattaccttatcattcttttaataatcacagatgcccaaattgctcctattgtaactccaaaaaatacttctatacctgccaatgctttcccaatcaaacttgtagcaaccatatctccatatcctactgtactaaatgtagccatgctaaaataccataaatccatatacattttgaaaatctcacttagtgagtaatcacctatattgtttatatctaaagctacaagtgtgctatttgaactttctatgcctacaaataagtataataaagcaaaaacacttattattgctataatcactaataatatattccatggcttttctccataacctgttgtgtaacgtgctatttggtcaaaaaatttttcaactaaataatcactgaaagtaggataattagaacgtttcattattttactactataaattctttccttataatagtaaaatcctatcatctcatattctccaatttttgttgcttgatttctagctattctataatttatcttgccatgctcatactcactttttccatattcaacattctttaacacaaattttgtacacatgctaaaaattattccatccattcgtggaaaattttctactttattaactaccaaatcaggtcctttaaatttcactttttcaaatatacggtcatttatatagtttttactaaatatggttctattaaaatcacagttttctaagaatatacaaccattaaataaaactttatctctaaattctgtatagttaaaaataatattctttttaaaaatatattttttaaaatttgctttttgtttaaatatggattcagaaaaatccagtattttataattgtaagttaatatttcttccgcattaaattcattttcaaaaacaaatccattaaattcacttatctcttctttatgaatagtatccatcatcaactgtatctcttcatcagacttattttctttatgaaagatacaatatccagaagaatctgcttctctatgacatttttttctctcatctatcttagatatccatttacaattcataaatatatatcctccagtacaaaacaattattactattttgtattagtttggatattattttattttatatacttaaatagttacaaaatatatattagattcttagttttaaatttttaatctacttcattgtgcttttaatttgtttcatataaaaaataataaattttatatactttgatttatttatatattaaatattattctaaaacttacttatcatttttaagtaattttgtaactatatttaatgctactaaatcatccataaatcctattgggaacacgaagtctggaatcacatctgttgatataacaaagtaaagtagcatacttccaatcaataaatatttctttattgtaagtccatctgtacaaaaatcagcatacatttgtcttaatctatctgtaaattgaccttgtttttcaatagaatctatttttttattaaaattatcaaaaagtaattttttaccttcatctgtttggacatataacttacacttacttaactctttttcaatatttccattaaagttcttatcattgattaaatttgcaaatccaagaatatcatcaaagttactaaaatcactatctgcattaaatatttgattattgctgtttctaaattcatatcctgaagctttcaacagttcttctaggttaatatttaaatgtattgccatcttttctaaatgatttatatttggcctttgtttattattagctatacgagatatagtagatttatcaattccactttttttacttagttctcccattgataattctttttcatctaataaaactttcaacaaatcaccgaaattcccaaccttactatgttgttccattattttcacctgctttattatgattggttttatattatatgatatgattcttttgttatttaggtgttgtatgatgttgaaattttatcaacaatttattggattatctgtaacaatttatccatttttacaatactataactaatataagtacaaaatttaagagaaaggatgttaatctactgtgattgaatcaattttattagttacttctctttgtatagatgcctttgtgacaagctttggatatggagtaaataaagttaaagttcccttatattcaaatataattatcagcgtagtttgttcagctattttagcaatatcgctttttgcaggtacaatagttagagattttttacctcaaaatataacaatgttaatatgtttctttattttatttttattaggaagtgctagactaattgaaagtttttttaaatcttattttaagaaaaaatctatacactcaaagaattataattttaatatgttagaccttgaattaaattttaatgtaagtatcgaacctgatgtcttagatacaagtaaatctaaagtgcttaaatctgctgaagcatttacacttgcacttgctttaagtttagatggattagctatcggttttggtagtggccttgtaggtgtgaattatatacaagttattctattttctttaatatcaaatataattgcagtattacttggttgtttactaggaaatatgtttgttaaaaacgtaaatttaaacttatcttggttaagtggtttaatcttgttagtcattggatttatgaagatatgttaataagaaagcaatctaaagataaacttttctctttagattgctttcttttgtgctttttatatttattttctattctctctaatttctttctgaatctttttaagagctttttttgaacctctttgaatatctttttctaattttctttctttaaaactagtaaataatacatctaaatcatacccttctggatacaattctgatgcttttatgctaagttgtaatctttttatatttactgaaataaaattatcattaaacaatacttctacattattaaacttgtccataggcttatatacaattccaaaatcatcttcatctagtaattttaccttatcccctacattataatctgtatagcttaaaatgacttcagaactatttttatcttcaatattagattgtagcttacttcttttaactaaatctaaattgtagtttctatcaattacatattctttagctctatctaaaactctattttttattcccatttttttagaaataaaaagagcattactatcttcagattttccaatagttaacttatacaatggttctaacgtttctttatcaaacatcataccagcattttcaaattctggatgtaatgtagcaaacttttttatctctccataatgagttgatgctatagttatacatcccattttgtaaaactcttctaataatgatattgctaaaccagctccttcattaggttcagttccacttcctatttcatcaaacagaacaagagtagaattatttgataaactcataatctctgcaatattttttatatgtgatgaaaaagtacttaaggcattttcaatactttgattatcccctatatctacaaaaactttttcaaatacactaaattcactaccttcttttgcagaaatatcaaatccacattgaaccattaaagttagtaaaccaacagtcttaagggttacagtttttcctcctgcattaggacctgttattataagacttctataatttttgcctatttcaaaatctaaaggtactgcatctcctgttagaagtggatgtttacctttaattatttttatatagccattattatttatttttggagtaattccttttattttttgactatacttagcttttgcaaataccatatcgtattctgaaagtatctctatatttaattttatctgacttatcttctcaaatataagttctgttaaataagataatattttgtattcttcaatagtttcatcagcttttagcatagttaactctgtacttaaatttgaaacactaataggttcaataaatacagtatttccttttgatgatgtatctaatatagtaccattaacttcatttttataagaagatttaattggtattacatatctatcatttcttttacttattataaactcttgtatatactttttatttacagttgatgttataaatttatttaatctatcttttatctttccttctgtaatttctatatttcgtcttatcttttttaattctttactagcattagaatcaactttattagattttatacagtaatttatctcatcttctatacttttacattctgttatatttaaagcataagaacttaatgtaggtgaataaaattctttttctaacataaaagctttcatcttcctacaacctcttaaaaaatcttcaatatttacaagttcaacaggttctattatcattcctttttcaattttatctattgtagaacctgcattaaacaatccttcaagtggtatgtgattactattttcaattatctttctagcttctttattttctgctaatttccttcttactactccaatattcccactaggagttaatttatctattaaattttttcctagcgaacttacacaatgtatttttattaagtctttaacttcatttagttgcaatctttcaaatgtattactattcattattttttctcctttatttataagtcatcgtcttttaaatcaccctatcatttactttgataatagttattttgcgaacaacttaataaataaggagttattatatatcaaactccttatttattaagaagtttaactccggactcattaatgttagtattttttttcataaaacacttctccttttctattcttatttaaacacttataccagtgcttctaatattattccataaattatatatttatgtcaataaaaataatgttattaatgtttttgtacagtgaaaatttttatagtgaaaataagcttatactttcatttatattttggaattacttatattgtcatcaattcatgtatgtgtagtttccaatacaatctaactttgtaatcattatatatcaaagaatttagctctataaattatcgtctctataaaataaaaaaatagctaataataataaaacacttttaaatgttccataaaattagctatttataatataattttaatcttttttaactttaaaaattatcctttataagtaatcaatggcttcatagttgccactacttgaataagttcatattctatcaaactttcaataatctgctctatattcttatatgcctctggagcttcttgaaataataaatttacatcattacatataatctgacttttaaatttagtttgttttatagtatctttactatacttacttttaaggcgcgatttacaaactgaacgagaccattttctacctgctccatgtgatagagaatataaagatatctctgtattttcagtaggcataactatatatgatagactgcctcttgaacctggtataatcacagctcctctttcacttgaaacagcaccttttctatgtataaatttatcttcccttttctctataaagttatgatttatagagaatattgtttcaacatcttcagatgtacctattgactgcataatttttttactgatagcttcacgattacgctctgcccacattaaagcattatcatgttttttaatataatctattgctttctcactttcaacttcaagtccatctttatcataaaatttttttaaaatatcttctccataatttcttgacccacagtgaactaacatcataatatcatcagatgaaaattttaattgttcaaattgttctttattataaatttcacttatacattgaatttctacaaaatgatttccactccctatagttcctaaatttaaaattggacattcttctttatatgtgttttttatttctatatcggacaaatctttaatcttactaagtgacttaatccatttgtcttttttaaatttcttttttagaaccccagttttaaataaagtcattccgcatcctatatcatttccaattatatgtggataaataatatttttagtctcaactgctaaacctacaggtattttacctgtatgtaagtcaggtaatcctactactcttaaaattccatttaactttgaaatatcttctagttgtttccttgctatatcttcaatccaacatttattacttgctattatttttatattgctcataatttgctcctttttaatattctcctgcctttaaaaagtagcaaaaagctgtgacctttagccacagcttttttattctaaactgtaaaagcaggtggctatttgttaaaatactcctagacgtttaatacctcattattttttgttaacataataaccacttcctttcataatttaagactacactaaaatttctatgtatatcatttatagacattgattttaaaatacttaatatacaatttttatattatggaactaataataatcattgaaatcatgactatagctagaccggcaacaacaagttttttatgtaatttttttctcattttacttttatattcttttttaacttgtataactttgtcttgtttctgttcttcttctttctcatcttcaacttctatatatgctttttcatacattactttacttaaatcaataataatatcattggctctagtatacttattatttcttccaagaagcctttttataacatttataagttctgtatttccattaattgcttttatactattccaatctaatcccttatcaatagattgtagcattttttcttctgaatttgattctccaaaaggcaattttttaaatatagattcaaatagaataagacctgttgcaaaaaaatcactttctttatcagtataatttatacatagttgatgtgggcataaatatctcctgtttccatagcttcttgtattaaccccattatttgcttttgtaattccaaaatcacaaatttttatattgtattctgtatctactattatactactcgattttaaactaccatgatatgaatgattcctatgtatcatttctaaagcttttaaaacttgtatcattatgtttacaattgcttctaaatgaagataattacctagaattaattcatctagtccgataccattaaagtcttcacttacaacataatataatgttgtttcttctgtacagtgaatcccaacatctattatttttagtatataaggagagtttatctcatctaaagcagtactttcatcaattaaatttgaaacaaaatcttcacaaatataattattgtgctttataacttttattaacacatttctcctgtaaaaaacatctctagctttatagattttgttaatttctaaaacgtcatcagaatttactacctcatatctattgcctataaaattcaaccatgtcacctcctcatacattttatataactaaatctatttacaattataccaatatataggaatattttctatatattaatgattgtaatattaaaacaagaactaatagtgttaatttttacaaaaaaggctgtctcaaaatagagatacgcttcttttgtattgttgaaatgatgaaaatatatttgatttcacataaaaagagtgtctcataaactaaaaagttcattttgagacactcccttttatattacaaatatttctctaaaaaattatctatttttttaattctttataagaactatttgatatatgttctttttttatgacctttccacttgaatctttaaatattcgatatgtagaatatttattctgaccagtttgttttacctctatagatatatttggtttgtcaccagaattaccatagattactgatgatacacttcctccacctgcataatttttaatatatacaggatgcttatatggatttttaaactttaagtttaatcctccatcgctcacagtagcatctcttcctttaggcacataagtagatgcagatgaatgatttgtaacttgagttatctccatacccgaaagaagagccgcattataaactgttgaagatgtttgacaaacacctcctcctgctgattgttctagcttaccataaactataacaggtgcatctttgtaaccatttgctttattactaggtcctgtaagtttattgtatgaaaattcttcacctggcattaataatacatcactagtttttcttgctgataatcctacattatatgacctaccctctacagcttgtgaataagtagttgaatattgacctataacagaatttacagtttttacttgttcagttgttatatctggtttttgaagatttactttaagttctaaagttttatgctctttattttttatcatattatatatagactctttatttgctgccaaatcaaattctctacctacaacagagtctgtataacttagtccaccacttccaacactaatagaagcatttttcatcttaacatttatactatctgctattgaagacactttggaactaagttttgcctcatcatattcagcttttatcttcatatttgccttattcactcttatatcaatatatttttttaagttttgaaaataggaccctttttttgtactttcataagcatcttttacaacatcttctgtatcatattttaaatcaatatcttttggtgatattgtatattttttcccatcataagtaagatttaagtcttctggagtatacttatctgttatagcttttaatgcctctgctttagtcatatcagatacatttactccttctatatatacatttttagcgattttcccattgtacagaaatttactgttaaaaaaataagtaaatccacccattattagaactaaagctgccaatacaattaaaacacttcgttttttttctttacctaatcttgaaactcttgttgttcttctgcccataacttcacctcattttgacactagcttaaatttgcataatagagttcccatttcaaaactaccttagattatatttgaatagcttttgttaaacaaggaatttaatcaaatgtaactttattgtaaatttatgtcttataattagttttatttttgatattttttattatatttcttttactatttcttaacaaaaaattgtttattttataacaactaatttcatttatattgaaatttaaatgtaacctattacaggataatggtctgacaggtaaattttttctactgtgtatccttttaattcagtatttttattaacaaaaatgtaatctattctagagtttgatttttcaaatgttggtaagtaagacttgtttagtgaaatagccatatcattaaacatacttaaaaagacatttttctcattaaaatcaccacataaaataactatccccactaatctgttcctatagtctattatttcgtctaattgttttgctctctcctgcctatcaagtcccaagtgagtatttattacatttataattcttccatatgcatctatagttatacaaagagctccccgttgttcttttttgctagttaagaaaaaatgattactgtttaacattttagatgttgtaaatgtacaaataccatatatcatatttactttttttacatttgtagcaaagacaccatccatatttaaaacagcttttaaagctaaaaattgaggatataatacttcttgcaaacaaattacatcacaatccaattgttttaaatataaccccattttagttagagttaatctattatttgaatccatacctttatgaatattgtaggttactattttcataataatatcacctcttatgcaatataatacttactaaaatttaaacttatttacttttcacttaagaccattatttatcttataaaattgagtacttataaactttatcacaaaaaaacctaacttaagtatttatattctacataagttaggttttataaactattataatatttattatttcattcatttctaatgatgattctccttttttatctttttcaatttgccttcactaacaacaaataaaaatcccatcttcttgtatatttcatccaattcaattaaagttacttcaccattttttaaatttgttaatgttatatcttgtattcttcttgatggaattatcataagttatcaacactcctttaaattctttttaatctttatatttaaatatatttatgcattctgatatatattcataaattattaaaataaattcaaaaaacacccgttctgcaaacattcgttctgtatatttattatacatcatacagacgttcgattcaatataaaaattaaatatatctcgtttttagtaaattttacaatattatacactaaatatgtcaaaacatcttcttgaaatagattatcttgtcaaacaaaaaaaaccatttcagtaaaagcttctgcttaaattgaaatgacttttcttatttaaattattaattttataccatatttttattaagctaacatatgtaatatttgagttaccacaagagcacaataagtccctataatatttcctagaagccccataagtacacctactggtattaatacaggattgtgaaccccagcaatcattggagctgtagttactcctcctatattagctatacttcctacttcacaagtaaataaatcaagtttaaatagtttagcaagccctataaatgaaatagcatgtacaaggactactaccaatccaaacattatgtaaacaggtgcttctgacaatccaaagaaatttgctttactacctgtagctgcaaggagtaaatacataaacacatttcctaccagtgtactccctttaagctttgatatttttgtcatacccaataatattgatactgtagatgcaacaagtactacccacatagtttcattaagtatacctgaagttggaagtatcttggatacaatttgtgcaaaagacgcaactccaaacccaacagaaagtaaaatcataagttctacaaacgtaggtgccgtattatctttattttctttttcaagttttgatgtaacctcatctataaaacttgtatcgcactttgtccatttgttaaatttaggtccaaatttcacagacattagacaaacagacatccatactgtatatcctatagaacccataagtattgcataactaagtccttcttctgcaactcctagagcattagctgctgcaatcatatttgatgagccacctatccatgaaccagatgctgccccaagaattttccatgaatctgcacccattgaatttttaaaaattatgaatgctataacaaatccaagcataaatgtaaatgtagcacagaaaaatgataataacattttaggccccatctttaatatttttcttaaatcacattgaattaacaagaacactaacattaatggaaggaagttcactgttattatgttttgatacgttccaacatcttcattctgtgcaaataaaccaaatgatccaagtatagctgaacctaagtatattaaaagcattggattaataacatcaaataccttccatttcaatttatcaaccataaaaaaaattacacctacgaatacaaccaagaaactacaatatacaaatccagtctcaatcacattatacacaccctttcttttcctaattaatttgatttttatgatttctaagtaaagactttttcagataatagacaattaaaataaatacttttatctatatcatgctaattaaatacatatatacctaactattgacatatattaataaagatttgcacattaattactttagaaatgaataatctgaatttaaaatctttttcaacaattattttattactaaaatttttatttgtaaagataattaaactaaatattttattatttatttattttgttttgtatttatttttattaattattaaataaaactatttttactttaaatctatataatataaatcaaatttattttatatactttttttttaaatatgtttagattctattcttttaattttagttttcagaacatttgtatttatgttataatttgtataaatatatttatttaggaggaaacaatatgaatttaaatttaactaatactataaatttaatgaaaaaatatttggacattccaagcccagctggatatactgaaaatgcagttttagaaatcaaaaaagattttgaaaatttaggtcttgacactattcttacaaaaaaaggtgcacttatagctactcttcctggtgaagatgattcaaatcaaataacaatatctgcacatatggatacacttggagctatagtaaaagaaatatcatctgatggtactcttaaataccataaagttggtggtggatgttgggcagctatagagggagaaaactgcactgttataactagaaaaggtaaaaaaatcagaggaagtgttgtatttaagtatgcttctactcatatatatggtcaaacaaaagctgccactgaaagaaatgaagaaacaatgattattagacttgatgaaaaagtatttacaaagcaagatgtattagatttaggaataagtgttggggattttgtatgcctagaccatagatttgaggctacagaatctggttttataaaatctagatatatagataataaatcagctgtagcaatggttcttgaaatatgtagatattttaaagaaaacaatttaacgcctaagcatactactaacttttatataagtaattatgaagaaattggacatggtgtttctaaatgtttacctgaaaaaacaaaagaatttgtagcaatagatatagcacctactggaccaagtcaaacatctagtgaacatggtgtaactatagttgcaaaagataatttatcattatatgattttaatttaagaaacaagcttgtcgatgttgcagaagacaataatttagactacgctgtcgatgtatttactttctatggttcagatgcttcagaagctattcgttggggagaagatgttcaaatagcatgtgttggtcctggaacaaacaatagtcaccattatgaaagaacacatatagaagctattgaaaatacactaaaattacttataaattatatgcttaaagaataattaattatatattttaccaaagtcaattcttaacaaataattaactttaatttttatttttatacaaaaattggtttttctatagacttaatttcaatttactactattatataagtaacttcaattttctttagttaatttttattataatttatataaattgtataaaaattttcttcagttacttgttgttaaattaaatttttacaagctaaccctaccagaaaagagttatctaatctgtaaggaaatagtttaatatagcacattatacttgtgtaattaataacttttcttttgtagaaacttttctttacaaagaaaagttttttgattttggatttgtttaagacatattttctgagttaggaggatatttatgaaaaaggttgcagttataagtgctattttggaagagccaaaagaatgtcaatttaaattcaatgaggttgtatcaggttttaaaggtattattaaaggaagaatgggcattccttgcgaagaagaaggtgtctcaatcgtatgtatagcagttgttggcgaaatggatactattaatagtttgactggtaaattgggcaacatacctcatgtatctgtaaaaactagtatatcaaaaaaagaagtttaaggtggtgagtacaaatgagtctaaattctactccacaatcggtaagagtacatataggtctctttggtaaaagaaatgcaggtaaatctagcataataaatgctataacaaatcaaagtgctgcaatagtctcagatattgctggaactactacagacccagtatttagaccaatggaaatccttcctataggaccttgtgttcttatagatactgctggtcttgatgatgttggtgaacttggtgaacttagaataggtaaatcactagatgttttagaaaagacagatatagctttactagtagtggattgccaaattggtatatcacaagaagatttgtcactaattgaaaagtttaatgataagaatatccctcatattctaattctcaacaaaattgatactattaagaatcaatcagaaattttaaacttaactaaaaataaagttaaatgtccagttgtttctgtctcatcaacagataaaattggaattgaaaatttaaaaaatgaaataataaaagttttgcctaaggatagcactgagttcaaattggtatcagatttaattgaaccaaatgatttagttgttttagttgttccaatagataaagcagctccaaaaggtagacttatacttcctcaacagcaagttataagagatattttggataatggtgcaatttctatagttacaaaagaagatagtttaaaagaaactctatctaatttaggcaaaaaaccaaaacttgttattactgactctcaagtatttccacaagtaaataaagatacaccaaaagatattcctcttacatctttttctatattgtttgctagacaaaagggagaccttaaagaattgattaatggagcttatgctttagaaaatttaaaagatggtgataaaatcttgatggctgaaggatgtacccatcatagacaaactgatgatattggaacagtaaaaattcctaatatgattagaaagaaaactggcaaaaatattacttttgaatttagttctggagtatccttcactgaagatataaataaatatgcccttgtagttcactgtggagcttgtatgatgaatagagctggaatgttatctagaatagaaaaggcaaaatctttcaatgtacctattgtaaactatggtatcttaatagcatatgtaaaaggtattttggaaagatcacttgaacttttcaattattaaaaatttaactatacttaataattacatatttgaatatgactaaaaataagattaaatactttatagataaactttacagcattaattcattaagttttgatgaactactatatttaatagaaaatatcgacaatgaggaatataacttcgaacaaaatttaagaaactatctttataaacaagctagcgacatgagaaataaacattatggaaatagagtctacttgagaggacttatagagcttacaaactattgtaaaaataattgctactattgtggaatacaatcttctaataaaaatatcataagatacagactttcacctgatgaaatacttgaatgttgtgatataggttataaaataggatacagaacattcgttttgcaaggtggtgaagatgcatattttactgatgataaaatatgtgaaattgtttcaagtataaaaaataaatatgaggattgtgccataactctgtcactaggagaaaagagttatgattcgtataaaaaatactttttatgtggtgcagatagatatcttttaagacatgaaactgctacagacagtcattataaaaaattacatccgccaaacattgagcttagaactagaaaagaatgcctaaaaaaccttaaagaaattggttatcaggtaggtgctggatttatggttgaatcaccatttcagaacaacaaagaccttgttcgtgatttattatacctaaaagagttaaatcctcatatggttggaataggaccttttattccacaccatgatacaatttttaaggattataaacatggagatttagagaagacattacttatgctttcaattacaagacttctacttccaaaagttttattacccgctacaacagccttggcatctataaaccctagtggtagaaatgcaggtcttttagctggttgcaatgtaattatgccaaacctttctcctcaagaatttagaaaacaatattctctttacgataacaaagcctttactggtcaagaagcttgtgaatatcaccaaagtttagaagaaaacatcaagtcattaggacttgaagttgactattctcgcggtgataatattgaatggaggcgtttgtaaatgttcataaaccatgaacttattaattctttattagaagatgcaaaaaattcaacttctgatgatattgaaaaggtacttgataaggctgatagaagggaaaaacttagttataaagatatagctacacttcttgaagtagaagataaaaaacaactagatagattatttagtatagctgggcaaataaaaaatgaaatatatggtaatagagtggttttatttgcccctctttatgtatcaaactactgtgtaaatgaatgtgtttattgcggttttagtaaatgcaacaaatttaaaagaaaaaaacttaccatggaagagataaaggaagaggttaaaatattagaaaaaatgggtcataaaagacttgctctagaagctggtgaagaccctaaaaattgtgatataaattacatcttagattgcttagatgcaatttattcaacatataatgaaaacggaaatataagaagggtaaacgttaacatagcagctacaagtgtagatgagtataaattactaaaagaaaaaggaataggaacttatatattattccaagaaacttatcacaaaccaacatttataaaaatgcatggtcaatctataaaaaatgactattattaccatttaacagcttttgatagagctatggaagctggtgttgatgatgttggtgcaggagttttatttggtttatctgaccctaaatttgaagttctaggacttatgatgcacaacgaacacttagaggaaaaatttggtgtaggtttccatactatatctttccctagattgaaaaaagctgaaggtatgagcttagaagattttcctcacttagtttctgacgatatgttcaaaaaaatagtagctataactagattggctgttccttttactggaatcataatgtccactagagaaactgctgaaatgagaaatgagttactaaaatatggtgtatcacaaattagtgcaggttctctaacaggtgttggaggatataaagcatatgaagatggtgacaatacagaacaattcgaagttggagaccatagaagccctgttgaggtgcttaaagaactgattactgatggatatatacctagttattgtacagcttgttatcgtaaaggtagaactggcgatagattcatgagcttagctaaaagtcgacaaatccataatgtatgtacgccaaatgctcttactacattaaatgaatttttaatcgattatggagatgaagaacttaaaattatgggtaaaaaacttatcgcagaagaaataggtaagatagaaagagaagatataagaaacatagtatctaacaatatgactgccttagagcgtggagaaagagatttatacctataaaattttattacttatatattatttattgtatattccataggttagtagtaatattatctaaagggaaagtttaagggagggagattaacattgaaagataacaacaataccaataaaactattcaatttggagaaaaaaaggctagcctggaaaacaatattcaaaaaaataaaaatatcaaacttgataatacacacaaagtcattccttaccctaaaaatagaaaaaaggatgataaaaagaaaggtaacaagaaaaagaatacaaatacatctaaagtaaataaaaataattatggccattcttttttcaataacaaatacaaatataaaagaaaaccatatgttattgctttatacacagtaattcttattcttttagctatcttaattataactaaattaacagatagtacgaataaaggtaattattctcgtaatactgtctctgatactcacaaaaacgacatccgaaatatagtctttaatgaatcaaacaattttcttatttgtgggtaacttaaaagagttatctcatttcagaaattactttctaaaattgagataactctttttttcatttaatatttattttaccaaccttgagttacttcatatacttcatcaccaattctaccatttaaataatcatctattgcagaatctatgatgctcattgctttatctacttgctccttagttattactagaggtggttgtactcttaaagtagattgtcctaagaatatcattattaatccagtttgtatacatctataacatatcttagctgtagcatctggatgtttttcattagaaccttttcctttaactatatcaactcctatagataaccctattcctcttatttctccaattatatcgtatttttcttttagtttttcaaatcctgctttaatataatctcccatttctatactcttttgaagtaagttttctttttcaattatctctatagattttaaagcagcgacacacactgttgtatttccagctaaagtaaataaatgtgctggtgcatcaagactttgcattatttctgttcttccaacaactgctcctaaaggtaatccacctccaacagattttccaagaactataaggtctgcttcaacaccaaaattttctataccaaaccacttacctgttcttcccataccttgttgtatttcatcacttacaagtaatattccattttctttacatattttacttaaaccttgtacccactctactggaggcactattattcctgcatctcctgcaattggctctataaatattgcagctacctcttctgctggtagatagtgtgcaaaagcatattctatctcatctaaacattctttagctgttctatttttatcaggataatggaagtgataaacttctggtaacaatggacccatttttcttctcatatttgtacttaaagcagatatagatatagctccataagtacttccatgataagattcacacatagatattatctttgttcttccagtataccctcttgctaattttatagcagcatctatacaagcagaaccagttgcactgtatagtacttttttatcattatctccaggggctatttccacaagcttctcagctaattttacaggaggatcactatggaaatatgcaagtgtatattgtgttatatcatccatttgttctttaactgcttgtgagatttccttattaccatgacctacatttgcagagcctgcacttgctaaaaaatctacatattcattaccttcataatcatatagcattgcaccatcacctgatttaaatgctactggataataaggtatcttttgagttttagcaacatattttttttcttctgtacttatcatttgactagttatctcgctcattggcaaatcatcccctctttaaataaatttatgttctaaaattattgcgatttataaagatattctcatataaaattctttatatacttaatgttagtatttttgacacaaattgtcaatatatgtttttataattttcaaaatatttgttatttagaaacaatatattttatttttatcaaataaacattatttttcaaaaaataaaggactctattctatttttatagagtcctctgaaaataatcttataaataccattattctattcgtcttcattaaattgtataattaccttttctcattaataatttttttaaaatgttctagttgctcttgttgttttttatgttttatatgtggaaatgcttttataactcttttttgtaaaataatattagactctatacggtccaacttactatttattttgtttattttttctctaacttctaatccgtcgttatttattgttttaaataaagcttgtatttctcctctatcaaatttatccaatttcacatttatatcattaaggtctgtaattatatcgtctagtaagtttaactttatatctaattttttaagtgttataatagtaacaatcaaatcaagtatagtccaaagtgttgtaattatagccattgaaattaatattctatatggaattatacttacaaaatattttataaatggatgtataaatcttattattaaaacagacattacaccaaagtatattgcattttttaaacatactctaccctttatattgaattttctgtcagaataatcccaccatttagcatgaaataaggtttctaaaataaatcctgtaaaatattctagtatcgtagttaaaatcattcctaatagaaatactattactacattattaaatcttcctaatagtgatatcacaattactgctccaaaaccataaacagggcatattggaccatttaaaaaacctctgttgattattcttttgcttgctatagaacatcctatactttctactgtccatcctaaaaatgaatatataaaaaagtacaagatatattttattatctccataatttatctctactccttcactaatgttcttattttatgcacaacgtaaaaataattatagaaatagttttttcgttttttatatttgttattcttttattcttgtttaatattttattcatacaatccaattaataatttactagccataataccatgtttatcctttggctgattttctttatcaatccaaacattaatagtatcatatctccttaataaatctaaattcttcacatcaaattcctcatatttaactatatccatttttgattctttggtaattatataagatactaattttgtattttcatttaaataaattcttatatttccatcagaatcaattaaattctctggtctctttactttgttattagaacctgctttaatagttattattccttttttaaagctctcaaatgtcccaactatatctactgtatctttatttatatctttaattatttccctattttcttcaattaatatttttgatatttttctatcaggtctaaatttaaaagttagtaagttatgataatttttagaaataactcctaatcctaaaactcctaaaactaaactagtagctattatagccttaaatcttttaatatcattaggaaataatttattcatgtttatgtaaatattaattccaattattccacctaatgaatttaaaataacatcatctatatcactacttccaagagcaaaaatatattgtgttaattcaaatgctaggctaacaagtataattactataattatagtttttttatttagatttttacatactataggtaaaaaaattcccataggaataaatatacctatattttctataatatttacagtagctttcataaagtcaagattactatctactataaattgatatattgtataaaatggaattaaatttacattcctaaacgttcccttgaaaatagcgtaaattggtacatctctaaataaaattattcttataatcattaaaatatataccaaaaatattatgtatataattgacagtaacaatttttctgactttttactttctatcactgataagtctcctttcgctattaatattttaagtatatcaataaatatttaagacgattttaaaatttccttaaaatttccttaattttcaaacaaaaaatcaaaaaagcctacacttaaatgtgtagactttaataaattttcatacaaatacattttattgaataacgaacaatcttaatgtagaaaaaactataactacagttaaaagaagtctagcatataaaaaatttttttctttcaacataactcctgcaactccaaatataaaaaatagagaagcaataaattttccaataagattattattaggataataactaaaaagcataaaacaaagtacaaatgtaagtactcctattgcattaaacacaattttattagatgctatttttcctttattgaaaaagaaacagaatattgacactaaatctaaaaataaaaatacataaaacattccttttaaaacgcccatttttataccccctaaaaattctaattataatatccagtttatttcatataatcgtcaatataatcaatactttataacatcagtataacagtattacaaatttatattacgaatgtattacttcgtattcatacatattataatcacactcatacatatttaaagactcatatgttgcttttgcatttatgttttctttttctacatataatctcattccaactatattttcatctttatcacatatattttttatataattaaataaataattaaagataccttttcttctatattccttatctacatatacactctgaatccaaaggaaatttccatttctccaatcactccactcatatgtatacataatctgtgcaacaactttatcaaatactgtatatacatgatattttccttttctctcatctaataacaatgcttttacacctttagttaaaacatccatatcaagttcttttccttcagtttctttagccaaattataattaaattttgctattgtatccaaatcatccatacgtgcttctcttatctctattagttcttcattttcatataactctatgtagtccttttgttgctccatacttattcctccatatctattttatctactaaggttttttatataatatatttatagagttttttctatcttcataaatgcataatcaagtgtagcctctaaatttccattattcttacctcctccttgagctaatactttacttccaccacccttgccatctataagacttattgcatcctttaataaaactcccatattaatatcttttaaatttttagaacatgcaaaaactaaatttattttatcattaaatttaacagctaataatgcaatactattttcatattctgcaattttatttgctatcttatttacatatttcaaatcttcatcatcataaatttttttaatgaccgaaatattgccaaccttatttgctttttcaatcatttctttgacctgatatgtagatactacttcttcaagccttctttttttaattaaagcctcttccactttactatttagatttacaataccatttatagcatcttcctcactacagcttaaatatctacatattttagtcaaatatatatccctcttcaatacttcatccactgcccttttacctgctagaaactctattcttgtacttgacttatgtttttcccatttctttatttttatcattctcaattcaccagttgattttggatgcactccacaacatgcattcgtatctaaatcacctatttttattactcttatctcttcatcagtatttggcaaatcacgtcttaaccaaatcttttttagttcttttttcgttggaagtaatgtctctacttgtatattttggcgaataatttcattggcaaacaactctatctctctaattttgttctcttctaaattaccttctatatctactgtactatactcatttcctaaatgaaaacctgtcgtatttgcattaaaagttttaaaaaaacatccagataatacatgttgtccaaaatgttgatgcattccatcttctcttctatcccaatcaatactacactttaccttatgtatctttataggttttttatctaatacatggtatatattttttccatcttcatacacatttattacatcatcattctctatttttcccaggtctccaaactgacctcctccaccaggaaaaaaagctgtcttatctaataaaacatgatacttattttctacttcttttatttcaattatttctgctgtaaaatctcttatatactgatttgtataatataacttttccattataattctatctccattttcttaattatagactactttactttttaaatacaaatttcaagctaagcttaatttaattgtattaaaatagaactcatcctattatttactaacatcttctactatattttaacatatagatattagtgttaacaaatttataattttatattatttcaatattttataacaagtatgcttacttattttcttatataataaaatgtatattaaaacatattaaattgcaaaataagcttcaatctcttttactaatttcatccattattaatgattttgaaatatacattgcttctataatattcttaaaacgtgtatgatgagatgtctcctcagaaaatttcttctgtactttttcacaattaataatccttgaagatgctactctcagtacttccatcaactcttcttttgtatgataattcataacacatttactcctttgttttttaatttagagaaacagtatacctcaatttaatatcattatcaactgatatcattattatttatatatatcttttaacacttaaatattctaactatcagtgacattacatattttaataattattaatatacatataatactttaacattcattaatagagagtatattaacattgcttttttaaaaattttagtataaaatcatattaaataaattttctgaaataataaaatattaaaatatccaaaaacagcttttgataacatctataattttcaatgtatcgttattttagggggagtgatttaaaatggcaataaagccaagaaaaatatctattgtaggttcagggcatgttggttctcattgtggatttagtttaataactcaaggagtttgtgatgaactctttatgattgatatagatgaatctaaatcaaaagctcaagctttagatttagctgatgcagtttcatatctaccacataaagtacatatagaaaaaggaactttttctgactgtaaagattctgacatagtagtgataagtgttgcagactcttcagaagggcctttacgtagacaaaacacaactagattagatttactaagaccaactattggaatgataaaatctatagtaaaacccatagttgattctggctttgatggtatatttgtagtcatatctaatcctgttgatgtagttacaaattatatttgggaaaaatctggctttcctaaaaataaagtcattggaactggaacagctttagattcaacaaaacttagaaggattttatctgaagaaactggaatcgctcaacaatcaattcaagcttattctatgggtgaacatggagattctcaaatggttccttggtctcatgtttcaattggtggtaaaccaatcttggacatgataaaagacaacccaaatacttatagcaatttagacttaccatcaatagttgaaaaaaataaaaaaacagggataagtataataaatggtaaagattgtacagaatttggtataggtactgctttagtagaaattgtaaaagctatactacacaatgagaaaaaagttcttccagtttctacattactagaaggtcaatataacgaaagaaatgtatttgcaggtgttccatgtgttataggaaaagatggtattgaagaaattattgaaatcaatatgactgaatatgagcaaaacgaatttaataaatcttgctctgttttaagagaatgtattgcactttcaaaaacactttagattcaatattctttcttacactaaaagcaggtaaatgacttattgaaaagacttttaactaagttaatgtttaaatcatttatacctgcttttaattttaatactaaaatataaacctattttttaccatcaaattttataactttactttttttatttacctcttgagataacaatccttttttcaatcccatcaataattctaagtcttctggataaagatttattccaaattcctctaaacttgatactatactatttacactcattattttattttctatcaataattcaactgctctttttaaatacgttgggcttgaacctttcattttgtctagtggttcttctatcaaccagccttttttatccatttcattcataagataattgtattttttgtaatttatcttttctagattatatgctctaaaaatcatagcagatataggtacaatccattttttctttagttctacataataatctaaatcttctggatgagtcaaatcttttaaaaaactctcttttggcaataaaaatgcacaggcatactcatcttctgaaaattgcttacttggtattcttaattcacttgatattatatatccaagctcacatgccaaagtataatttctaattgatgctgactttttgtcattacccagagatattagatatttagattctttactaattctctgtttttgagtaaagatagttgccccttttctatctacattcatacctgatattataatccctttagattctaacaaacttaccatatttactattggagtactatttaaatcccaaaactctctagtcttatatgcaagagattctatatcacttatattaatatctgacattacttttctatttggcaagttttcttttggaaacttaatataattctccataaatgaatatattttatgtattataattattttttctctataagaaatctcttctactctaggtagtttagattgagggttaaaatggctatcctctacaacgatatttatattttcatttttataaaaatactcttttggaaaatttaatatattagataattttaatgtattttctatatttggtacatacttattttcctcaaaagcttttaaatcttttttatttattttagtttctttagacaactgttctatcgtctttgctctaaaaattctagctgattttaatctctttccattaaagtcttttaaattcatttgttttctctctttcaaaattaaattcttaatctattggtataaataagattacaattaataatttatcatattattgacaaaaaaacaaaaggtgaaaatatttttttatattttcaccttttagataagtttataataaatattcctaattactcaaaaagttttaaatattctccatatcctaaaacttccatattttctcttggtataaatttaagagaagcagaatttatacaatatcttaaacctccaagttcttttggaccatcatcaaatacatgacctaaatgagaatttcctttagcacttcttacttcaattctgtacataccttgtgagaaatcacttctctcaatgatagatttatctataactggctttgaaaaacttggccacccacatccagaatcaaatttatcttttgaagaaaataacacttctccacttacaatatcaacataaattccctctttgttattatcataatattcattttcaaaaggtacttctgtcatatcattttgagtgacttcaaattgtataggagttaaagtcttttttaactcttccctatttatattgtttccatcccaatgactttttacaaaattatatcttccagaccctttataatacatattgtagtttaatggtctttttttataataatcctgatgattttcttctgcttcgtagaatttagttgctggaattatatcagtcactattttactatcaaatattttactattttccagatgttctcttgactctaaagctatatttttttgttcttcatcatgataaaatatagcagtcttatattgagttcccctatcaccaaattgtccaccatcatctgtaggattaatctgtttccagaagatatttagaagttcatcataacttattatatcatcatcatatgttatttgaattgcttctaaatgaccagtagttcctgaacatacctcttgatatgtagggttttcaacatgaccacctgtatatccagaaactactttaataactccatcatacttatcgaaaggttttaccatacaccaaaaacatccacctgcaaaagtagcaagttttatcattttcatcactccttaaataaattatactttatttattccctaagaagtaacttaataatctgcattttattatttttacctactcaatgaaatcatgtgcaaaaatacaattgcaaattgaatctaatttctataaaagctctttttctttatccatccaaaagcatcttttatatcacaattttctcctaaagacattagatattctaatgcatcacaatcatccatagctacatctttttccatcttaggatttaatctatagtaattatctccaagaagtttttgagaaaataactgactcatttgagaatttccttctaaggtaatagatataattggtaaatcgggttctttattaattatccagtcaatagctccccattcagtagtatctgcctttatactattatatacatatccagtccctattgaaaaaagtcttgtattcttaagtttaaatccactgtcaatggcatgaattatacacgctaaacttgggtcagttgctattattcctccatcaacatgacgattatatgttggaaaaaatactggagcagcactacttgccattgctacatctacaactttgctagtctttgtaaaagaatttggcatattgttataaaacactggtttccatgcattttcctcatttcctatataaaaacttggtatcattactaatttatttaaatcttttaattctagttcctctggaaatatacttaataaaacttcttttaagtttttgttttcatactttggtctgagtatttctgcataacttttattaaaaatatacttagaattttcaattgagtaaagttcttttatctctttagggcttacaccatacgcaagtcctagtgcaattagactccctgtagatgtccctccaaacatatttatattgtttaatagatttggatactcttttactatcctctcaagtatggatatactcaatgccccttttaatccaccaccatcaaatgccaatatattaaaattagaacttttcatatacatatacccccacataaaacaccttatattttaatcaaaataatttcactatagtatatatattttatgcaagttacatattacaatgttcctcttttaatatttaagttacattcaaacctttagtacttaaaataaaatatataagatattatatatctaagtattataaatttaatacaaaaattcttaaaagaatatactgaaagcaggtttatttttcaattattacaaaaaataaataaagggtcgtctcaaaattgattttttaatcaaattttaagtttaaccccttatcttaattgtgacatacttaaaaatattttaactataaatatctttaagtatagatatatttatttatcctaaaatcttcttcatatcttcttcaggagtagatataggtgtcaatgcaaatttatcaaccaatatatctaatacattcttagataagaatgctggcaaagaaggccctatatagatatttttgatacctaaatgaagtagtgtaagaagtatacaaacagctttctgctcataccatgacagtaccatgctaagaggcaaatcatttactccacattcaaaagcatttgccaatgaaactgccactttaattgcactataagcatcattacattgtcccatatccattaaacgaggtaagccacctatatccccaaggtctaaatcattaaatctatattttccacatgcaagtgtcaatataacagtatctttaggagcttgttttacaaattcagtgtaataatttcttccaagttttgcaccatcacaacctccaaccaataaaaagtgtcttatagctccactctttacagcatctactactttatcttgtacagatgaaactgtacctcttgcaaaaccagtagttaatgtatctcctccattaataccagtcatatgaacatcttctctatatcctccaagttcaagagctttttctattacactagaaaaatctttatcttcatcaatatgaaccatacctggataagcaactacttctgtagtaaatactctatctctataactatctttaacaggcattaaacagtttgttgtaaataatattggagcaggaatattatcaaattctttttgttggttttgccatgctgtaccaaaattaccttttagatgtttatattcttttagttttggatatgcatgtgctggtaataactcaccatgagtatatatatttatacccttatctttcgtttgttctaataatttgtgtaaatcataaaggtcatgtcctgtaactacaataaatggccctttctcgattttcatagatacctgagtcggttctggtgttccataagtttcagtatttgctctatcaagcaattccatacattttaagtttatttctccagttttcataactagacctaaaagttcgtcaatagacaagtctcctccaactgctattaatccttcatagaaaaattcatttacgtctttgtctgtataaccaagtaccattgcatgatatgcataggcagccatgcctcttaatccaaataagattaatgattttaatgaacgtatatcctcattatcattccataaatccttcatatcatagttatcatttctattacaagttgttgaacaatctgaacatctaggtacaagtttacttttttctacctcagttttttcaatttgtctttttatagcttcatcatcaaaacttacattcgttatagtagtgaatagcccctctatcataattttatctgtttcacttgttggtctattcttatttccaatagttgctcttgaaagaccaatcaacactcctgtaagctcgtcttgcaagttagctgtacccccctttttaccacaaacaccatttatagtacaacctttacctcctgctgtttgttcacattgaaaacaaaacattttttccattttttattcctccctttttatttattaaaatttattatatttttctatgattcacttaattaaatttctccatctacaatttttccatctacagatatagtaactatttgccatggtatcatttttccactattttgtagagctgtcttaacagcatttactataccaccacagcaaggaacttccatacgtgttactactatatttttaatatcattttcttttaaaatctctgtcagtttttcagcatagtcaacttcatcaagtttagggcatccgattaatgtaaccttatttttcataaatttattatgaaaatttccatatgcatacgctgtacagtctgctgctattaaaagacttgcattctttaaatatgatgcattagttggtactaattttatttgtactggccattgattaagttgagaaccttttatctctactatatcattgcttatagatgtactatttgaaacctctctatttattgacttagactgagaacctggacatccacatgctaaagttttcttttgtgctttctttgcttccatatttgcttttactgcagcttcatcatattctgctgcttctctatactcaaatgaaatcgcatttgttggacaagttggcagacaatctcccagcccatcacaatagtcatctcttaaaagttttgcttttccatttaccattcctatagcttcttcatgacaagcttcaacacatagtccacaaccattacactttccctcatcaattttaattatttttctcatcatttatatcacctcataaaatttttttaatttaaagtattgatttcttatatatttatttttaatacctatatttctttatttcaaatttcttgtagtaggatttttatatccccttgcttttataaacttagtatagtacaatgaaaacaaattatcggttgcatatgcaacaaggaagtgattatttgaaaaaatttttagaaaagcatatagacctacttaaaaaaattcctctatttgaaggaattaaaagtgatgagcttgaagaaatgttggaatgtttaggtgttgtagataagacttacccaaaagatagtataatattctctgttggaagtgaagttacttctattggaattatgcttaaaggaagtgctcatataataaaggaagatatcgaagggaataggaatattgtagctgaactcttgcctggagatttatttggagaggtattcgcatgtactagactacataaaagtaatgttacagtaaccacaacatcttcttgcgaagttttatttataaagtttaaaagtgtaactggtatttgttcatctgcatgtgtatttcataataggcttgttgaaaatatgctacaattaatagctgaaaaaaacattttacttcacaataaaatagaattactttctcgtaaaacaactcgcgagaaattgcttatgtatttttcaaaacagatagaacaaacaggtagccaccagtttacaattcccttttcaagaaatgaaatggctgattttttatgtgttgacagaagttctatgtcaagagagcttggcaagatgcgagatgaaggcttgttatcttttaataaaaataaatttgaaatcttttactttcaaaaataaactagatatttaaacatatttatttcaatatatactatattagttaattcaaattataaatatcatatttgaatcttaaatttatatttttacttaaaaagttaatagatatctaatttattaaaattaagatacctattaactttattaattaagtgtacaattagcttattttctttgtagtaattgctgttttatctataagccaatcttttccttctactaatcttgaaactaacattgatgatactgtatttccagttgtatttaatatagtattaggaatatcagttatagtagttataactgttaacaatggaattgcctccactggaaaaccgaagatgctaaccacgagcatctcaccaataagtcagccacctgctacaggagccataaatactccaacaacaaatacagttataaataattgacctatcgttgctggatttgccattccactgcctaaaatacctgataaaaatgccacttttattattactgctaaaactgacccatctttatgtatatttattccaagaggtataactgtttctgatatatcatcaggaactcctatatttttactagcttctaaatttgatggtatacatgctgaacttgaagaagtagctagtgccgttgctattggttttatagcatttctccagaattgtctaaacccttgttttcctgcagataaaaaagcatacagactgtaaaataataagaaatacatggctgctgttagtgaataaattacaaacacccttacatatccttgaattattttgcttccaagttccccaattattgtagctgtataacagcctagccctataggagcataaagcatgactatacttactacttttaatattgcttccgttccttctgataaaaactttcttattgtatttcccctatctcccatcatagctattgctgttccaactaaaactgcaaatataactaattgtagtaaattgctactggaaaataaatctccaaaatttttaactgtaatacttgatactacttggtctaataacgttccttttgattctaaagtttctgcatcttgagccaccattaaactttttacacttgatacatctaatcctttagacggattaaataataatgcagatgtaatacctaaaaatgcaattacaagtgttgttcccataaatactatagctgtactcttcattatttttccaaaacgttccatattttttatactagcaacacctgaagaaacactaagaaaaactaatggtactactatcattaatagagcatttatgaataaatctccaaatggttttagtattgaagcttttggaccaagtactaatcctactatcacccctattatagtacatgctaaaagtataattgatgacttataattttttaaaaagtccctcatttatattttcctttctaatgttttatattataaattaccctaaatcctaaaaaaattaaagtaaattatctaatgcgcattaataatttttgtaattttccccaacagctactttagcaaatactggaatatatgtcaatttctatagtttttttgtatctttaatattttattaatagttcatatctatatataaatattaataaaattctgcttttaaaactttttttctagattaattttaataaaacaaacaatataaaaaaatatatataatattgcttaattattttcaaatttaataatttgtactttaatataaagttttagtatactcattgtaattcctatgctttatcattccatcaagttaattttgtaaacatatatgatattttgtcaaatattattttttcatgtacttgatatttttgatatacttttaaaaagaattttcaaatagttacatttctaattttaaattaaataataaatctaataataaaaagatacttccattaaatttattatctaacttataaatttaatgggagtatcttacatatcttctaatacttaatttatacacttttaactaaatacttcttctttcctaacgatatttaaaaattttgcagttctttcatttttaggattattaaatatttcatcaggagttccttcttcagctattacaccattatccataaatataattttatcagcaacttcttttgcaaaatttatttcgtgagttacaataagcattgttattccttctttcgcaagcgattttataacgcttaaaacttctccaacaagttctgggtcaagtgcagatgttggctcatcaaataatattacatttggatttactgccatcgctcttgctatacctatcctttgttgctgccccccagacaattttgatggataaaaatctttcctatccaacatacctactttatctattaattttaaagatatttctctagcttctttattactctttttatgtactactatcaatgcctccattacattttctaatgctgttttatttttaaataagttataattttgaaataccatagatgtatgttttcttaaattggctatatctttttttgttgctttttctacatctacttttacatcaccaatcattatctttccttttgtaggctcaactaaataatttaaacatctaagtaacgtagatttacctgttccagatggtccaagtatagctactacttcactttgatttatctctaaatttatacctttaagaacttctgtccctttaaaacttttatgtaaattttctacttttatcattgttatccacctttttaaataaatataataaataatatgttctacatcaaaattaatatactagcattaaatttaaaaataggctaaatatatttttatgaatgtactctatagttgacataaataatctactgcaagttgtgagaataatgaagatgctatactaagacatttttcatctatattaaacttgttactatgcaatctgtagtttatatttttttctttatttcctacacctatatacataaataaaccaggtttttctttcatataaatagcaaaatcctcacctgtcattgcaggaaaatcaattatttcaacattttcaactccaagtattttgcaagcactttctcttcctagctctatcatgtttttgtcatttataacagcatctcctcctgtactcttttcaaatttgcaatctgctccgtatgctctacatacatttcttactatattttctagaattttacttacttcaattacttgttccttgcttatcgctctaatagtcccttgaagtgtgcatacatctggtattatatttttagaaacaccagaattaaaagaacaaacagacactactacaggtacaactgggtcaatttttcttgaaactatctgttgaatggatgaatatactgcatttccaactgcaattgggtctatacaattatgaggctctgctccatgcccgcccttgccaattattgttatttcaaaagtattagtcgctgccatagcacaatttctagcgattccaatttttcctgattcaatagttggccaacaatgaccagttgctaatgcatccacaccttcaagtacattttctttaattacaatatcagaaccacctttttcttcgccaggttgaaatagtaattttacatttccattcaattcttcttttatgtcatttaaaatcattgctgttcctaacaaccatgaaacatgggcatcatgcccacaagcatgcatattatcatttattgatttaaattctaaatcattttcctctttgattggaagggcatccatatccgctctaagcaatatagttttcccaccattattttttccttttatagtagctaatactcctgtaccagcaacatctatgtattctattttaagtttatttaactcttcttttataagtttggatgttttaaattctttaaatgctaactctggattactgtgtatctgtcgtcttatttttatgattttttctctattttttagtgcaatggattttattttagtttcaatcatttgcaagacctccataactcattttaatttataaagactaatctaaatacattgtaatacacagataactatagataaatttagtatacttatctatagttatcacagttttatattttaattttaaagtatttatttttgtatatcagcacttacatccattccaaaccatttttcagatatttttttcactgttccatctgaaagcatttcttctattgctttatttacatcttcttttatagttttagatttttcatcatttttcttaaagaagtatgctatattagtaactgataatttttcatctaatactcttaccttcatattagcttttttagcgtctcctacaacagtaagttctgcatcaatccatgcgctaactcttcctaaatctaaatcttgaagaccattagttccatcaccataaaccttttcttcaaacaaattatctttattaacactagctgcaacctgttgcccttgagaaccttctgaaactgctacaacttttccttttaaatcttcaagtttattaatttcgttgtttccatcttttacagctatacatacagaatcagaaccataaggtatagaagcatcgtatttttctaatctttctttagacattccaaagaaattggctgccacatcaactttaccagaatctaacatcccaaatatagaactaaaacctgttggttccatttttatcttatatccacttcttttaccaatctctttccacatatcaacttcaaaacccttatgctcaccattatcaacataagaatatgggtcagctgaattagatgaagctacagttataactttttcatcctttacttcctctttttttgaacaaccagcaactacaaatgttaacgataaaactgccactaaacattttataatatttctttttaccatatctcttctcctcacaccattttttatataaaaatacttttatgtattttcttaataacttaataattgcttattttcttttctaattttttttgcccccaccctaaaggagttattatgcaccagtaaattaccataactgctccatacacttcaaagaacttaaaactcaacgctccttgtgatttggcagcacccattatatcatttactccaacaacaaaagctacagaagaccctttaattaaatctataaaattattgaataatgatggcagtgcaactcttacggcctgtggtatcactatccttttcattgtttgtaaatttgttaatcccattacatatgctgcttctatctgacctttatcaattgaaagtatagatgcccttatcgtttcggacatataagctcccatatttaaactaagtactatagatgttgcaaatactgggtccatatttttaacaaaatcgttcatatacgctagtccaaaatataaaaagaataactgtggcataagaggcgtacctctaaagatagatacatatactttacatatttgattcaatactttcactttgtaataagatgataatgctactattgtacctataattaatgaaaatactaatgaacttattgccaaaattacagttacattgaacgatttcattattattggaaataattctaaaaaatatttcatattaaaaatcataaaataagtccccctagcttaatgttgttttttataaaactttgtcgaatattaaattacaatagaattttatttattttttcaatagaaaaactattttttaacttgattatacagtccattttgatactatattttctcaataatttagattactaagtttatttttctaaaattaaaaatttatttacaagtaataatatatctacatcatcccatttttaaatattgaaatctaatatgcctttcctattcttttttcaactttgctttgtatattactcaatattatagatactgcccagtaaattaatatcgttatcatatatatctcaaaatatttaaaacttgaagcagcctctacttgagctactcccattaaatcttgtattcctatagttagacctaaagaagaacctttaattatgtccagtgtacagcttacaataggaggtactgcagatgtagctgcttgaggtagaattattttaaccattgactgatatttacttaacccaaaagcataacatgcttcctgttgtcctttatcaacactctcaatagatgctcgtataatttcagtcatatatgcagatgaatttacacctaaacaaattactattgctaaataaggtgaacaatctttcataaaagaaaatatcattggaaatccaaagtaaaagaaaaatatttgaattaaaagtggtgttcctctaaagaatgaaacatacactcttgttatgtattgcaaaacttttgattttgtctgtgtgaaaaaggcaagtattacacctaataatattgataaaaaaaatgcaacaatagatattagtattgttattcccaatgctttaatcaaaaatggaaatatacttagacaaaattcaaaattaaaattactcattaataggctccttagtaatgtcttttcctagccaggcttcagatattttagtcaaagtcccatctttatgcatctcttcaattacttcgttaatttcttttgtccatttttcacctttttcatttttttgaatcgcaaaagaacaggctccgaattgaattggaggttctaccattttaagatttaatttttgttcttttatagctattaaagcctcaacatcctgcgcaactactgcatctaatcttcccatttctagatcttgataattccctttaagagttgcacttgaataatttactatttttatttcatcatttgggtacttttcttttagtatttcatttgctactgctccagtacccacacctactttcttgccaactaaatcatctattgattttatactagtatcatcttctctaacaataatgtttgttccactataattataagcatctgaaaaagcatattttttctctctttcaggtgttgcagtaagttgagcagatacaacatctgctttatcagcttctaataatccaaataatccactaaaatcagttaatacccattcaactttacaattagttcgtttagcaaattcatcccaaaaatctacttcaaatcctttaagtttatctttatctttaaaagcaaaagggtaatatgttcctgatgttgcaactcttatagttttttgttcttctttatttttattatttcctgatgaacatcctgtaattaaaagtgctaataccaaggcaagcataataattaatttaagttttttcataatttattctctcctttttaatcttattttaattttttatataatacattttcaaaggttgaatcacttgtaccattataattgtttaatggctctgccataacataactcccaaatattgatactgtagtaaaagattgcctcttattttataccttactaaatttgcttttataacactataaatcaattttctagttattatattatacttcgactttgaacaacataagtttaatatgttttacagtctttgtccaatagcaaaaaactattactaaaaatcacattatagtatccaactatatccataaaaaagctatattgagtttttattataacaaactcaatatagctttttgtaaaaatatcttataccaagtataagtcactctctatatttaatttatttattaaattttaatgctcctgtaggacataccattacacaaggtgaatccataccacacttatatctctcaatacaaccattacacttatttgccttaccatcatttccataaattaaggctccatattcacaagctttttcacaaagtttacaccctatacagttttgattgtctaatacaacgaatccttcttcttttttaaaacaatttttaggacatgcacctaaacattttggctcattacaatggatacatgctaatgaaaaatattctatattttcaccttcctctattgtaaatacatgtctaaaaagttcaccattgtctatattattatcattttggtctatacatgcaagcaaacatgctccacatgctgtacataattctttattaaatttaaataaacttttcattatatctctccatttatctattcattttttcaatcttacacttgcaacttctatacgcagggaatccactataagggtcaaaattatcatcaataatactatttatatcagattctctatatccatgatacatatgtatattcttatataagactctatcagtaacattgacttttacatccaaacttcctatcttagtagttatttttatataatctccactgataacacccaattcttttgcatccaagctggaaatatcacaactagcttcattttttaatattcttgaaagtttgatgtcatgaagtcttgaatgtagtgcatttgaaattcttgctcctgatgtcaataaatgagtatattcattatctatattatcattaaatcctctatatgttggtagtgcatccagtccaaaatctttatatttttcaataattgtagattttaattcaaacctagaagtgctagtatcatacccctctcttgtatatgagcctactatatatggcttaaaatctttacattttaatggtaaatcactttctttaagtttatctacatctacacacgtctttttaaacatatgtcttatacttgcttcataacctgcttttaataaatcatcatctatattcataacatttgctaaatctgaaagtatttctacatctgattttgaatcgtataatttatcaataacttttttggtatatgtaatataccctcctgggtaactcttacattcttctctctcaaatgatgtacacgcaggtaaaagtatatctgcatattttgatgtatctgtcataaataaatctatattcacaaaaaaatctacactatgcaacgctttaaaaagtctccctgaattaggaaacattctagcatttatcccatgacaaaacaaagctcttatttcatatggtgtcttttcttctatttgcctaggtaaatccatagcttgaaattgagttaccatttcattccatagaggaaatctttctccaccaattctttcatttatatttttaggtagaacttcttttacaaactctttttctagtgtttggaatccacctatcttaccagcaaagtaatcttgttttggtatgtttccacctattctatcataattacctgttatagcagataaagacatcattgctctatagttttgaaatccattttgatgatgaactattggagctgcactttcatttatacaaaatggaccttgtgacaacatctcaacagcttttactatattatctttagaaactcctgtaattctacttacagtatctaaatcaaataattttacatattctttatattcattaaatccatgtacatgcttttctatgtattctctatctattaaatccttttgtataaatagattcgccattccaagagctaaagctccatcagttccaggtttaattcttaaatgtaaatctgctagtttttgagttgtcggtgttattctagggtctacaattataaattttagacctttttcttttaattttattagattcacactatttaaaaatttagagtagtatggattaaatccccaccctaaataagtttttgcattctccatatcttgcattgtaaagtttcttccagtagcaacatttccagccatctgtgctgatgttgaacatgaactagattctgtaccataattaggtgaaccaaatgaagatgcaaacctttgcaaaaaaggtctataccactttccataacccgtaaaaaaagctacatgctttgctccatactcagattttactctatttaatttttctgctatttctctataagcttcatcccatgatattggtttaaattttccttcacctctttttccaattctttttagaggtgtttttattctatcttctctatatatatattctctattgcaaagacctttggtacataacaaccctttattcattggatgttcttttgtaccttctatttttattactttaccatctttaacatatgcatcaattccacaatgtactcctggagaacaaatatcacataaagtcctctttatttctatacctgtttccttacagggtattttagctttaagttgtctataactatccatattaacattttcctttcccaataataaatacaaattattatacttattatacattctttttattcaaatatcatactttatattttatatagtgcaatttctaagaatatttttaataataagattttatatttattaataatctatttatataattatttttcattcatagtttataagataattcaataaaaatctaatagtaaattgttatttacacatatattgtaatagataaaagctattcatatctgccttaattttagtcttaaatttagagtgtaaattgaatgcatttagattataatatatacagtgaggtaaggtgaataatatgaaaatagatatgatatataaactaataagaagaaatacagaaccatcaagatggtcaagaggtgtaaaatattatactaatcaattagttgattatatagacatagatattgatgacctacaaaataacctgttgacatttcgtggtggagtcaattctgaagataattatagcttttattttaattcaataactatagatataaagcactttaagataattgaaaatgattgtagttgcgctgactgtcaatcaaagggcaaaagtatttttatatgtaagcatatagttgctattgtgataaaaagcttaaaacaaataaaaaataaaagagatgttcctcctattctaatagatatattaggtgcagataaggataagctttctaatacaaattctaaaacaagcttagatttaagcaagcaattactttctttgttagacaatactaaaagagaaagggttaatttagatgtattgataaatgtggattcaaataaagcaattgctgaatttaaaataggaattgataaaatgtacattttaaaaaacattactgaatttgcatattcaaaacttaatggatatgaattagattttgggaagaaatttacttacaaccccaacattcattattttgctgatgaagatgagaagttagtagatattatagaagaatatgggacaaatctttcatacaacttttcttcatcacattcaaaaaaatttatggagataaatgcaagctctttaaaacaatttttaaatgctattaagtacaaggattttacccttattttttctaaagaggaatatcatccaaagatattaaatgatactctacctgtaaggtttgattttaaaaatatagaagataaaatagtcttatattctaaagattcactacctgttccacttactaaaaaaaatgatgtacttttatatgatggcaatatctatttattatcacataaaaaagctcatgattattcaaaaatatatcaaatattatcaaagactaaagagttaaaatttgataaagaggattctaaggatgttttaggattgctagttcctagattaaaatctatatctcaagaagttcatttagatgataacataaaaaataatataacaaaagattttaaatctgagttctactttgatatgattgatggcaacatatgttgtgatgtaaagtatatatatgatgatgaggataaaaaatttgtgctccccaacatacaaaaggaaactactattgaaaataaacttacttcttcacaatttacaaaggaaaataatcattatgtgtttaaaggaactgactatgacctatttacatttttagatttacaattagaatctctaaaggaatttggagatatatattattctgagaagtttaaattgaaaaaaatatataacgcttcatcaattcaagcttcaatcaatcagactaaccagaattacctagaatttaattttaatatatctgatataaatccaaaagagtacaaggatattttgaaagcttttcaagaaaaacgtactttttataaacttaaagatggaaactttatagatttatcagaaagagaaacaaaagatttttttgaattagttgaaaatctagatataatggataaatcaaaaaataataaaatttataaaaataaagctctatatataaatgatgtaatacgtagtaaaaatttaaagtttatagatggtaaaaaagaactagacagtatatgtgaaaaatttagaaattttgatagcataaatttagaaattcccgcaaatttaaatgcaaaccttcgtgattatcaaataaatggcctcaattggtttaaagttttagattattataaatttggtggtatattagctgatgaaatgggtcttggtaaaacaatacagactattgcatttttattatcattatctaataaaaaaagtcttattgttacaccgacatcactcatttataattggaaaaatgaatttgaaaagtttgctccagatataaaagttttattgatacatgggaataaaagagatagagaaaaatgttttatggaattagaaaattttgatgtaatacttacaacatatggtactcttagaaatgatttagaaaaatatagtgaaataaagtttgattattgtatattagatgaagctcaaaatataaaaaatccagtagctttagtaactgagtctgtaaaaagtataaatgcagaaaataaatttgcactcactggtacacctatggaaaataatctactagaattatggtctatatttgattttataatgcctggctatctatatagtaaagcaaagtttcaggaattgtttataaataaagaggataatgttaaaaacctgaaaaaattaataaaaccttttattcttagaagaagtaaaaaacaagttatgaaagaacttccagataagattgaaaaaaacttttttgttgaattgaataaagagcagaaaaagatatatagtgtatattcaaaagatatacaagataaaatgaaagataaaaatctaaagaaagataaaatagttatattttcttatttaactaaactaagacaactttgtttagacccaagtatagtagtaaaagattacaataaaaaaagttcaaaaattgaaacatgtttagaaatacttagggatagtataaacgaaaaccacaaaatattattgttttcacaatttacttctgtgcttaagaacataagtaaggaacttgataagtataaaattaaataccattatatagatggtaaaactaatgccaaagaaagacttgaacttgtagatgagttcaataatagtatggataaaaaagtttttttaatatctttaaaagcaggcggaactggtttaaatcttacatctgctgacatggtaattcactttgacccatggtggaatccatcagtagaaaatcaagctagtgatagagctcatagatttggtcaaaaaaattcagtacaagttataaaattgattgctaaagggactatagaagaaaaaataataaaattacaagaaagtaaaaaagagcttataaatcaatttataaatggagaactttctaatgaaggtgtattaaaaagtctatctgatgaagagataatagacttatttaactaaattatttaatcctacagcttaactatataaatttattctaacatttatatagttaagctacaatatctgaataaataaaatttcatattgttatttaatcccaactttacaatctaatgatatctctttctatacatattgcatatacaaatgtaataacttgactattagaatattttgttttaacaatcctatttcatcataataatgaagtatatgtacactcacttttgtaagttttgcaatccattttacagttttcattattgtaaattttggttaaattattcctctaaaaatttctttgctacatttgaaaaatctaatccattcgataaaattgcaggatgaccacctttatcaaacaaatacattttaccatttttaatcttttcaagaagtaatgaaaaagtattttcaaaaaaatcactagatattagagatacaaactcatcttctctacttcctgttaaaagcacctctggttgcatagtttctagaggcttatgaaaaaattttcctatagttttataatgttcaaaaatagcttctgtatcattatctacaactttttcccagttttctccttgattataaatataaaaagcttttgcaccatcatcttgctttgatgcctcacgctctattttaacattttgtacaaatgactctaaaggaacttctccttcaaaactatctgcaattaccttattcactaaatcaggtctctcaagtgcaacatttaatgcaacaagagctcctccactactaccaattatgtttacttttttatagttcattgcttctaaaaaacatatcacttgcatagcctcatcaaaccataagtcagcagaaaatttatcgaccatttgagattttccatgacctacaaaatcaattaatattactttatattcatctttataaaaatcgattatatcattaaacattttggaagaggctgtatttccatgtaaaaaaagtaatggtgtaccatccccaatttcattatagtagcactgtttgtcgttatagttaaaatatgccatatattacctcctttaatatccctataggtatatatttattacttatatttaaaatgactattgtcataaacatttaaaaatagtatagcttagaatgtagataaagtcaacattcctttccttaacaacttctattgttttttgaaacttcatttcgataacagaataattcataaatattgatactcttacttaaatatatgatttcatcatcagagagagcagtaataactaaattatcgtatatctcttttcactttaaccatttttttctttataggtatctccttatatttttttaatatcaaatctcccttataatttaatatatctacatatgaacataaatcttgaacttcaattacacctatatcatcattagttataccttttatattactaaatgcaccaactatatctaaaactcttattttcttcttcttaccagcatttaaatataatttaacaacttcactttctatatttagttttatatctttacttttgtaagaatttttatcaactttttttctctttgatactttttttaggattccttttgaatattcttcaaacaaaattttgccatgtgtaattctacttttttctatatcttttaattcatttactttatatcctatatacgtttctatattctctatatatttttcatccttttcagttactatagtaattgcctttccactatttccttttctcccagttctacctattctatgtatatagttttctttatcttgtggcacatcataatttattactaaagaaatatcatcaatatgtattcctctggacgctacatcactactaactaatatattaaatttttggtttttaaaatccttaattacaaaaattcttctttcttgtgataaatctgcatgtaactctcttattaaaaaaccctctttactcatcttattatataatttagatactttctctttggtattacaaaatattatcacactctttggattttcgctgtatattaattcttttaaaaggatgtacttctctcttccatttgccttgattattttgtcatctatttgtcttgttttttgattagtatcgctctcattttcttctatatttataacactgtaatctagcatatatttttcacatatatattttatctcttcatctattgtagctgaaaaaagacttactattttctccttaggtaaatttaataatattttttccatttgttcaacaaaacctttattaaacattttatctgcctcatctattactaaatactttacattttccaacttaatagaacctttatttatatggtcaagtattctgcctggagtagctacaacaatatgaaccctttgtttcaattcagctatttggtcttttatagattgtttgccaaatatagcactacatctcaccttctttagtctccctatatctgatatctcatcttttacttgcaaggctaattctcttgttggaaccactataagagcttgaatattattgcaatctacatttatattctcgcataaaggtattgcaaaacttgctgtctttccacttcctgtttttgacctaactactaagttttgaccttttaataattttggaataacttctctttgtactctagaaggtatattatatcctaaactcttcaatgacttaagtatcttttcatttaacttaaatttttcaaatgtatatttcatatattaccaccttattatatttatcttatctatatatttttctacattatattattataatacaaggttctactatttttatattatttattagactgaagataaaaatatatactctataaacctatagtttagtagcaaatcaattaaatttttatatttaaatacctccttaaatatactgataaatcaatatttaggaggtatctcttgtcaataatcaaactaatctatattttgaaagtttaaattatactaatacattgtatttttatttatatctaatattaaaaggtattaatcaatacctaaatcaccataatctcacatatttatatctttattcaatataccttctgtaatcaatcgtgctatataatcataacctgattcatttgctttgttacaatcattcacattatcacagaaaaaactttcaatctgtattgcaactggatttgtatttctcaatatatataaattttctctttttttagctcctctattttcaaataattctccaagtctattagatactcttttagcatattctaatccttcagtgccatagtaaagcacttctgtaccacattgtgttccatcagctttatttaaatgtagctctactaataaatcgtatttaccactgtttacttttggaactctatagaaaaattcttctctttctgacataaagtgcctttctggacaaattattacatctactgtattaccttgacttataagcatctcagctaacataggagctaattttttattataattgtattcatcaactataccatttacacctgtacttttaccaccttttagtatactatgacctactgttatgcatattttcatttacttttttcaccttcttttaagccaatttttatataatagtaatataattttaaagttattactaataataatatattaattgaagaaggtaaaagttctccgtgattatcatttttttaacatatttgtcttattttatcataagtctatattttttaaatattatactatacttattatttataattgtttaattaatcatttatatatattataaatatatcaatatctattttcctttaaccaaatgctattttaataagtttaagttttagctttaaaatacttaataatacaataaaagtgatgtatttacaaataattcttctggatttaattcatttattgatgtatgttcaatttttatatttatatttttcatatcttcataaataattccaactggagaacaaatgaaacaagaaaatccaaaagtttttgttattttttttaccttattatcaccaaaacttatttgctttttacaatcgtttatattttcattgttattttgtatatcatttttataatacttatcttttttaatatcattaaacttatttactgttttaaaattactcctatttttacaactatagtctatttcaacttctatacacccaaaaactatcgagttacataatttcaaattactacctttgtttataagatttttcataggtttaacatcaaatattttactatttacatttacttttaatatatctcttagatttttaggagcttttaaagtattacttatattcaattgtttgaatacaattttatttacattagtataaactctattactttctattgatattcttgttgggaatttatctagattacacttataataatagtatatattagcactattctttataatcctatgtgcagaatttggtaaaactacactcttaaaagatattatttttttacaacttgcatctattctccctatgtaaaaaccttgctgtgggtctaatccacgttttataatgccattaacttttacagtattatttataaactctatatatttagaaatataatctttgaaaaatatatttccagttttgtacctacttgtatttgtaacaataatagtgtaggtcaaaatctcaaatacagatgcacattttttatcaacatatttttctacttttataatacttccatttgcatcatttgaaaatacatcattaaaagtagttttcgttattctcattgcatccacctttctataatttaaagattactctatcttggaactattttcataacttataattgcagtaacactaataaataaattatcatctaaaatagatgaagtaatatcttgtataagatactttaaattaattttatctttattttctatctttctaggcatttgtataaatgtactaaagggtatttttaatttaaatgtattttttttactagaatttctatttcttttattgcctgcataatctaatgttacatcagtatctatatcgccaactaaaatcaacttctttcctgtcatttgttcatcttctgacgatatacattccatagtatcaacgagacttatgctatgaatattcatattataagtagatgtatctaatgagtttattacagtttttttagaagttaacttaaagtttttatatgtattaaattgagataaataaagagcattttctagcttttcacatctttcaaaattatatattaccttattattttcatacataatcacatcaatctccctatatctatatattaatactattcataaaaactatttcaaattaccatttttgattattcacgattcagttactacttacttttaggaaagaatataaataatagtgactatactaattatccagattaatatagtcactactttaatacaaactaaatgaatattatattattttttacttgaaatttaaacaatctttattttcattaaatctattattccggtttatatatgactttactatcagcatcatatattaccaaagaatttgcttttatgacttcatcattgtacttaatgtctttttgagaaaaattaactaatacctttaaatcttctccatattcagtcatttgaactagtctatcctcagaaataaatttaaagtctgtcatttcttttttaatagctttcttattaaacgctgaccatactttattgtttgagattatttcatctttatgtttttcccattcagttctatctatataatacataggtggtgtattatataatacttctttcatcattctacttccaacttcatccttaatcttcaaagttccccataaccactgatgggaagatatcacagaatcattataaactaatctaaataaaggtagagagtaaattgggtctataaatatttttttgtacctttcttttacaggtatctgctttgaaaatatttctggtactcctcctgttggagaatagtatttaccaacataatattcactgcctttattcttactcatatctttatctacccaagcaaatgctggtgtctcaataccatgtgcaaatgctatagtactacttgaaaaatcatttccaccttctgaacctatgaccatatttgcatggtctcttatatatgacattctttcaagtctagcatttaaatcttgtgtttgtgttgttatatgattttgagaataatcatcatagatttctcctgtagcatcacaatctataaaccaagaattaaattcatatccttcatccaatatactttgtactctctcttttacacttggtaaagacaatgtaggatttagttttcttccttctccttgaaatccagtttctttttcaccttttttattttctatggtagcattttcatatagagatttatctttaaatgatgctgtactccacttttcttcccctggtttgtgtatagagtggtatgaatcatatggccctacgagataacctaactcattagctcttttaaccatctctaaggatatataaccttcctccatatcatcaaatcctatccacgcatttttaataccagacttattaatatcattaattacatcagttgtattatattttgcccatgtagcaacatcattcacgctctcttccaattttgatttcaataatttcttattaaactctataagttctaccctacttaatttagatatacctttatctaatactttttttatttctctatctttgctttcaaaaactttttcattataaaaagtattcatctgcataacttcattaaatgcttgtactatttgatttttttgatatttatctatataatcttgagtttttatttgattaattacttttataaattcactattgccagacttcatacttaaaagctctttcatccaattagtcaaatcatctgataaattttcttttaatttattccattcaatatcatttattgtgatgatagacttatctccaaaataaatatgtggtgctccataaagtttttcaatatttttattttccttagatttttcttttaatgttttaaattctcctttatcaactatataatttttataagtttttgctacatctgtaatattcttattagtcaaatatattttaaacccatactccttatttttattgatacttggatattcatgtttaaatgtaaaattaatcttgtctttagaactaaattcaattacattgttaaattcattttcgataatataaatcacagaatactttgccttgtttactgcaaagaattgcattgaaaaagattctataacattataagttgactcatttagatactccttccaatacttatcattacttggtataaacttaccctcataaagtggtagtatataactttccccttcaactttgggccaattaaaactagtttctttttctaaattagatttaatatttacatctaaatagctgtcctctttttttatatttatgtctatattttcatcaggatacgtccacgatgcctctgtcttattctttttaaaatttgatactttcctttcttttgagggttcagatatcttttcttttgaaccaccagattcaactgatacctcaaatatttcaggtttcacctcaaaactaaaatccaaatttttaacactattgataggtgatgtattttttatcacctcaccactactacatccagtaatagtagttacaacaaccatacaacttataaatatcgagaatatttttttcataaaaaccacctcctcgataaatatatcactcctatgttacataaaagttacacttcactttgaatttcgctgtctattaattgaagattatactgttgaattaattctattagacgagctgcatatatactattgccattttcatccttcgcagtactataacctgccttttctaatgctttagcttgatatatatacgtttttgcatcaaatacaccattgtttttataccttttatttgtggctaaaaattttgcatggtcttttatagattcatttttatcatcatatattctaaatttatcatctataattgtatctaaatgttctttcgtttctaaagtcactgacttacctttccaataagcgtcagcctttataccaaatagattgttatattgttttgccaaagttgacttgccccagctagattctattatagcttgtgcaatagttatagatggaagtattttataatccttataattttgtattgcttctgttttaatttcagcaataaacttcatatattttgtatcagacttcaatctttctggttttataccataatccttaagattgtctatataattatcaaccaatcttttttgtctattactaaattctaactcatccaaaatatcacttaacttatttattttattatttttagaaaaattcttaacaaataaatctgatacttcttgtatctgtgaatccttaacgttttttaagttatttttatttaacacagcaacaatggaagctacatacttccagttaacttgtgcattatttttacttgctaaatcagcatattttatatacttactgacatttatatcatccttttttatctctctagatgaatattccttcactaatacacctattaaaattgatattatcagtattataacaatgaattttttattcttcataaatattgtcctcccttatactatctgctgaatataatataccttacttttgtgacatattctttacgaaattttgaagattttatgaagatttatgaaatatatttaattaaaggcactactattgttataatatatagttttctatcacacaaaatagttaaaatagataaataattaaataaacttattttaactatttatataataaaaatattattaaatctacttatcaatttttatatatttttctaatatatattttttcccatatacaataatttttattggtttaccttttaaattttctattttaattaaatcactacatacatctacattaataatattatctctataatttatattgaaagaataatttttccactcttttggcaacttagggtcaaaagatagagtttcattccatgttctcatgcctgcaaatccatgtacaatggaaagccatgaaccagacattgaagttatgtgcagtccatcatttgtatcattattgtaattatctaaatcaagcctagctgttcttgagtataattcataagccttttctaggttatctatttctgaggcaataatagaataaatactagaagataaagaagattcatggacagtatatttttcatagaagtcaaaatttctctttttttcttctttagtaaatctatttccaaaatagtaaattccctgtaatacatctgcttgttttataaaacacgacctaagaatcttatcccaagaccaattttgattaagaggaaaattttcttttggtaaatcctttacttctacaaattctttatctaaaaaattatcattttgaattattatttgtagttcctcatcatacggcagatacattttatttgatattattttccaaaactcaacttcttccctagtcacattatttctgtcaatacattcattacactctttctctaatcgtaagatattttctacagcataatctaaacaccatttagctatacaattagtataccaattattattgatattgttttcatactcgtttggacctgttactccatgtatcatatacaaatctttttttgtagacaaatgaactctacttgcccaaaatctagctatttctattattacatctattcctttttcttttatatatttatagtcacctgtataatttgtatagttatatattgcatatactatacttccatttcggtggatttcctcaaatgttatctcccattcattatgacattctactccatcaaatgttaccattggatataaagcacctttaagccctagtttttttgcattatcctttgcctgttctaactgattgtacctatattctaaaagatttctagttacctccttatctgctacacctagatatactggaacacaaaatgcttctgtatcccaataagtagctcctccatacttttcaccagtaaatccttttggacctatatttaatcgcgaatcttctccataatatgttgaaaatagttggaataaattatatcttataccttgttggctacttttatctccatttatttttacatctgcactttcccatcttttattccataactttgtatgttcatttaatatatcatcataacttttagatagttctatatttaaaatgtcttcacattttcttaatagctcactttccttataatctctagttgaagttatagatacatatttttctatacttgcaaccttattttttaaaacatccattgttatcgaattttcacagtaattataatcactctcatgagatacagcttctacatcaccatttgtcttaatatacatcattgaacccacagtgaatactggtgtattaaatgcattctcctttgttcgagaaagaatactacctttatattctaaagaacttgaagaaattccattccaaaacttttcctcatagtttgaatcttcattttttatatttgaatctaaatatggtacaaattttattttagtattagaatttaatgattttatactatatttaattactgcaagttccttaacagatatacttaaaaacctagtaaccctaacttcaaattttttatcatttatatttacaataaacctacgatttaaaataccatttttcatatctaattctctataaaaatcttctactttacattttgctaaatctaattctacatcatctatgaaaattcttacacctatatagttgactgaattaggaattttaccaaagtattctggatacccatttttccaccaaccaacacgagttttatctggaaaccatactccagctatataagaccccttgtgtgtatctccactataattttcctcatagtttcctctcatacccatatatccattgcctatactcattatggactctgctaatctattttctttgatttcaatcttatcttgtataatcttccactcatctacattactaaataaacatttcatataattctcctaactatatactcattatacttttcttgtatatattcaaactttaattgatttgttgaatctacaactaaatttgctttttttaagttttcataatttccaacaccaacagaaaacatattagctgagtttatagcgtctatacctgcacttgcatcctctatccctatacaattttgtggatttacattaagccctttcgctgacataagaaatatctctggatgtggtttattgtttttacattttcctgcatcagctataaaatcaaatttgtcacttatacccaaatgatttaatacatttattgcattcttacttgcagaagatagacctatctttatattattagattttacatcaattaacaagctttctatgcctggcaaaatatcatttgaagttatctcatctatcaatgatacatagtaattatttttttcttcagccattctcactttttcttcttctgaaaatgaatatttcttatttccaaattctaatatcctgtccaatgactccattctacttatgccttttaaagattcattaaattttgtgtctatatctatcccaactttatgggctagttttctccaagccatatagtgataatatgcagtatctgtaattacaccatctaaatcaaatataaatgcttcaatcattcttatttcctctttctacaagaaatttttagactaataatcaatttattttctatcttgtatttaagatattatttataaaattatctactctaactcagtctttaatttaaaatctactttcaattcactcacttgtaaaccatatttttttatgttttataaagacttgtttaaactgtataataatttaacatgaaatctaaaataaatactttttgtattattttaaaataatgaacttgtatttctctaacattagttcttcttttaaatcaactatttcttcttcatataaatcttttacttttttatttgctaaataatctggtaacgtcaaaattatatttttagatgaattatttattattatagaaatagattcttttttcaatataatcgttccattttccttatctgctaacacccattcatttgatatagacctaagttctttattttctttacgaagtctaataatcttcttcataaaatcaaatatatccttattccatttttcttcattccattccatacattttctttgaccttcagatattgaacttaattctccttccattccgatttcatcaccatagtatatacaaggacatcctgtttgtacaaacataaacatatatgcaagtttaaatctatcaatatttccattagcataagtcaatattcttgtagtatcgtgacttccaagtaaattaaaaataacttcactaacttgtattggataacttaccattacatcatttatcatatacttaaattcttcggcgtttatctcatctgtacaaaagaattttttcatggcttctgacatcaagtaattcataactgaatcaaattggtcacccattagccatggtaaactaccatgccaaatttctcccaatatataaatgtctggttttacttttttgacttcttctctaaactttctccaaaaaacatggtctacttcatttgaaacatctaatctccacgcatctatatcaaattcctgtatccagtacttgcctacatccaataaatattttattacttctgaattttctgtattaagtttaggcatatatttttcacacccaaaggtttcataaggtatatttttttcatctatctgttctattggagtatcaattttactcatatcttttatataaaaccagtttttatatcgagaattttccttattttgaactacatcttgccactgtttagaataatatcctatatgattaaaaacagcatccaacattatttttatatttctcttatgcgcttcttctattagtttttttaaagtctctttatctcctaatgtagggtctacctccatataatctaccgtatcatatctatgattggtttttccaattgtaatagggcaaaagtaaattccgtttattcccaaatcactcaaataatctaagtgttctatcacaccttgtaaatctccacctgtaaaattatctctggttggaatagctccccatttatctactccttctgggtttatagacgggtcaccatttgcaaatctatctggaaatatctgataccaaacagtatctttcacccaatttggcactttaggtatatctatataatttaaatatggatatccaaaaaaattacctatttcacataattccttttcatcattttcatttcccaactctattattcttttttctgtaaataaaagtttttcttcttgaccttctattataaaaccatatcgtgagcgtttatttaaaggcttacacttagctatccaatagtcaaataattcagtttctacttctttactcattactatatttgttccaccagaccaaccaactccagatgcatttaaatttcctcctcctgcacctcctttatcccacacatattggtctcctattcgtaaaattactcttttcgcttcattttttttagttctaagtcttatatgtagtgtttctctatcataaccataggcataattgctcattggtatatgtaatatagcttcttttgttaaactattttgaattgttcctttgatttgattacttaaagttatattttctttatttttattaaacattttaaaatttccctcctttataataatttatataatctaaagataggttaatatattttactattatatcacaataaaaatatataatagtaaaatatatcaacaataaactattcaatttaaaataaactatactatttaaatttaattctatttagttattttagcaaaataaaaacctctagtatttttctagaggatacaatattataactattaactttttaactatccattaatttacttcaaaacatactctaagctatattgttagatttaactttttttatatttacaaaataagtttctctttctttaaataaagatacatatttaaagtcaagatacttaagcatatcataggccacatcaaaatctttacatatatcttctaccctatgagaatcagaacctacagtaactataaatcctccaagttctttatatctttttagaatatcttcatttggatgtatagcatttaatccatatctataaccagaagtatttagctctataccactcccattattgattattgactttaagacctcatcaataacatctttaaagtcattgtatataactctattatctgaatatattccatacctagatatataatccaaatgaccatatatattgtaatctccaaattcacgattagtttcaagtatgctattaaaatatttataatacgcatcttctttgctaagacctttaaaatacgcctttgatggaacaggtacattgtcaattgtatgagttgagcacaatacaaaatcaaaaggattagaatttattatttcttctatttcattttttagatgttttctgtaacctacttcaacacctagtaataactctatatcctttttatatttttctttaaacttattaaatactggaacatagtcattataatttatgcaaaatcctctatcttcatcatgttctaaatggtctgtaaaagtcaaatatctaacaccaatacttatagctttttttattgtatcttccatggaatcctttccatcacttgaaaaattagtatgaatatgattatctattaaattcatattatccctccctttattttatctatcttaattatacaacaagtttattgtatacatttgttaaaagaaaattataatggttaaattttatttacatacttttatttttacaaaaaagagaagcacctatttctgattttagaaaatcattaaggatacttctcttaatgttacttttatatacttcaatttaatttttaaaagtcttaattttgtaatagagtttagctgttatatgtccaatcatataaaaagctgtataaagtaaaacatatatatatgcagaatcatttaaaaatatatacattaatactatataagttactaaagacacaataagagataaaatccaattagtcttatttaatacacaaattatcccttgtattaaaaaagaaattggaaaaatcaaaaccattcccacaacaaaaatacttttagattgaatatctggaatattaaatatatctgtagcaaaagttaaaaacattagcaccattatgattgtaggaaatatgatactaaaaatattactctttttcataataatcaatccttatttattggatatttgataatcttcaattattttgttgcctcaatttctcccatcattcttactaaatcttgtccatattgacctccagcccaattattagataaactttcaactgttttagccttaccaaataaagatttttcatgtctagggtctactggatttgaaagtgggtaaccatcttgtcctgcatataagcataaatgttgaatttgagctaatattccttcttcccaagtatcaaatcttgaatgggcattcttatcagtatcagaaccacctacagaagttttaagtccacaaggattcttaaatgatgcatctaatactccaccaaaattacaaaaaccagtttcttttgcagattgagctactgccaaaacaggattaacaccttcctgaacagcagtatcatataatattggtattaactctataaataaatcattagcttttttagattttgcccattttaagcacgcttctaaactagctgttggctgacctaatatgcttgtctcatttttcataggtgactcaccttttgtagacgaatcgccattattttgtgcagcagaaacacacttattatacacactgtcacttattgaacctaatctagtaatcttatctgctcctgctaatatagacttatcactactttctgacaccaatacaattggattttccttagcaattgtagaacctgtaagtgcatttactaaatcatatccatcactcaaataaaattctgatgcatctggataaaactcttttataactttcttatttgtatcatatctatctgaaccaccaagtcttttagcattagttttattaactaaactagtgctcattgatatactcccacctactgcatatgtttttacattgcttgttgaaaaaggcacactctttccatctgtaagtactataggagctatatctcttactgatacgggtgcagcacttattgtatctgcttctcctttatatgcattagttaatatcacttcatcaacttttttgataccatttacctctttagcaacactataactagtctttattctgtcatctccacccaatctagttacctgtgcccctgtgttttttagttcagtttctactgacttacttattgataattctttacctattatgtatatctttttaacattttttaatctttgttttgtttcatttggtatcttatttttttgtgcaagcaaaattggagcatcaacagcacctgcaagaccacttgctgaaagaccatctgctatagaattatccatatttaccataattgctgtatcataactctttttatctgctattaatccagccgtctcatatatattgttacctttaattgtatctgatgttaatgcatctacattaggtacatttattagaaatatagctaatgttaaacctaatgctaaaactcttctaattgttctcatattcttcccccttgatatatcaagtttaattcaaaaatgactataacatagtattacatctacgctatagtcatttattataatttaataattatatatttgttattatatcataaattacaaaaagtttccataatattgtatagattaaaggaaaaatttacattttagttacaatttactagatttttgttctaatgtacctatatttagtaacaatttgtaataaaaatcgatatctatattacatatttaattcactgttttacaaaatgaaattttattgtatacaataaatagattatatgtttacataatctatattatttttaagtaaatcttttatcgatattattaagaatatatattacatcaagtttattacgtgcaaaccactatcaacttaaatacctaaggtaacacttgaagtagtagattcttggtaacaataattattgctatcattatctttttttaattaagtatttactatttatatatcaatctacttttcacttttaatttaattctaacatttttttatatgttttatgatatataatgtgatatattctaattaatgatattttcaagtaaaaaaatgttactctattataaggtgatagtatacttgaaaataaataaaacacttaactttatttaaggagatttatgatgagtaacaaacaaggttctaacatcaaagatgtaaaaattaaaaataagttaataatattgaaattactttctacaaatacacctatgtccagagttgatttagctaagtctacaggacttactaaaatgactttatcaaatctagttactgaacttattaatgaaaatatgattagggaaatagagtcatcaactttaaatgcacattcatcaggtcgtaaacctattttattagatatttctaatatatcgccttgtatttgtggaatcctaataagaagaaatatatgtaaggtaattatttcagatttaaaaggtaatattgtaaaacaactttctgaaacttaccctaaatgtctatcaaatgatgttttaaaagatataataaaaagaatgtttactaaaataatgaaaatcaacaagagagatataattggaattggtatttcttcaataggtccagtagatgatataaatggtaccatactaaatcccccagactttggaaatgtatcaaacctaaatatagtagattttataaaagaaatgtctgattttccaatatttttgataaatgatgctaattcgggtgcattagcagaaaaaatgtatggtttaggtaaaaatatatcaaattatatatacctacacataatgaatggtattggagctggtctagttctagaaaataaacttcatactggcaacctaggacaaagtggagaaataggacatacatcaattaattttagtggaccattgtgcagttgtggtaacaatggatgtttagattattatacaagtgtcagtaatctaattaaaagaattgaatcattgagccatatttatcctaactccccattaattaactgtaaagatttttctttagtcaagttaatagatgaggcaaataataaagatagtcttgccatgtttttgcttgatgaattttgtacatacgtatcatatgcattagttaatacacttacattgattgattgtagttctataataataggctatgactttaatatacctggtacatttatagaaaatacattattaaaaaaattgactgcttcagcaagtttttctaaatataaaaaaataagtgtaaggcattcaaattttggagcaaatgcaccattaattggctctatagccattgtaagttataatttttttaatggtagtataaatttttattaaatatgtaaaatatttaaacacttttattgaatatttttccatttaatattattatattttataagagcatttaaaatttggaggtataaaaatgatttcagctaaaatggaaaaattacttaatgagcagattaaccatgaattatattctgcgtatctttatctttctatgtcttcttaccttgaagcagaaggacttaaaggattttctaattggttttatgttcaatataaagaagagacagaccacgctatgtttttttacaaatacttacataatgtaggaggaaaggttcagcttgatgctatcccaatgccagattcagactttacttctgcaatggatattcttgagcgtacgttagctcatgaaaaaaaggttacagctttaataaacaacttagcagctgtagcaaactctgaatcagactttagaacttctcaattcttactttggtttatatctgaacaagcagaagaagaaacaaattgtgaagacaatataaaacgtgttaaacttgctggagagggtggtctattctttgttgaccaagaatttgctaatcgtacatatgcagctccaacaaacccacctgtgacaatataacgtttaaaaatttttaatataataaagaaggtgttttaatgaaaatcaagattgattcttatcattaaaacaccttttattattcgttttatacgtagtattttattgtttatacagtgctatttcacaattaaactcaaaactatactttcattttaaaatatttttaaattaaatttggggtgactgaaaatcacactatctaacttacaaaatgtgattttcagtcggtgctttaattatggttgaataccaaaacttataaactatttatatttaactattaaggcatctactgcacatacgccttttcctttaggatatacaaacactggatttaagtctatttccttgacttcatccttattttcataagcatattttcctaatttgaccatcatatctgcaagagcatcaatatcacaaggctcacttcctctatagccatttaaaagcttaaatgattttagttttttaagcatcataatagcttcatcatgatttataggtaatggatataatgtagtatctttaaatacctctacaaatactcctcctaaaccgactaataacattggtccaaattggtcatcattagttataccaataataatttctataccactttctaccatttcttgaactaatataccatcaatattagcatctggttttgctttttttacattagttaaaatctcattatatgcatctactgcctcatctctattcttaattcctattttaactcctccaacatcagatttgtgcaatatttcagaagaatttatttttaaaacaacaggatacttaatatattttaagatttcatctaattcatcaatactttttgtattaccttgtcctggaactggtactccatattttttcatctcaatcttactatctaattctgataatgctactacattatttgactctcttttcttaacagctttaaattctaaagttctttttgaataatcataatctataaacttagccattttattaaaacaagtaaatgtagttccaactgatgacattataggcacttgattatcttctaatctagtcctataatctaaatatctatttccttcaagtgtaggaactgcaaacacaggttttttcaatccttgttctctagcttcacttacagctttacaaagggtttcatgcatttcattttcttcatctcttatatttgcacctaccatagtaaatccaacactatcatccttttcaaaggtatgtaataaacctactatcatatccttttcatggaataatgctgttgtagcatctagtggatttttaggtgttgcaaatcctggaagatattttttcatttcttctttagtttcagaagatatttctgcaagttctacaccattttcttctgctaaatctgcacaaatagtattttctcctcctgagaagtttattgctgcaaaattagaatttgcaggtaaattaccatctaaaacactaaaagcttgtgctaaacacataaactgttctaaattttccacagaaattactccatatttttcaaaaatactttcaaaagctttactcgaaccagctaaatttcctgtatgagaggcagcagaaatagcacctttttctgaccttcctgatttcaatattattactggctttcttttttgtgctgccctttttaaagcatctataaatttttgaggattttttaaaccttcaaggtaaattgctattactgatgcataatcatcatctacaaggaaatctactgcatcttctagtgtaactatatttccatttcctgttgaaaaaccataagatatattaaaataatcacttgaaacaatttcagcagttataaatccactttgacctacaattcctataccaggttttttagtatctaaagcccatttagaacctcctgcccatagattaaccttatctatacaatttagcaaccccatgcagtttggacccaatattttcatatcgtatgtatttgatatttctataagttgattttctaaatctgtaccttcctctgtaccttcctctgcaaatccactagcatataccactgctgcctttgttcctaactctccagaatcttttaatacagatggaactacatttctaggcgtacatactactacacagtctactacttctggaacttcttgtatcatcttataacattttctcccaaacaattcttctcttttgggattaacataatatactctatctgtttccttactttttactatactaagtgctgcacttcttccaaaaccaagtttatcagtcactcctactatagcaatactttttggtctaataagtttttccaaactcataaattcacgctcctatatgtttatagttgtgattttaagtgaattttatctcaagatgaagtttctcttggcactaaagattattaaatcttgagataaatcacttaagataagggtaatttatcaaatggcgttattatagccttccatgaatgctgcttcattttgaacattaaactttccttttcctttttcctcaaagaaatcacacatagtttttaaagctaattctttttcaagtaacccagttttagcaattaatgctccaagtactactatatttgctgcttttggattgtttactttttgagctaattcctgacaatttattttaactacacttatatcttctcttaatgttacattctcatctattgcagatgtattaataactactgttccaccttctttaactaaatttatataatctaaagatggtttattcattgctactaaaacatctatttcttccatatcaggcccacctatactctcatcagaaaactttactacactataggcttttccacctctcatagttggaccatatgcaggcatccaagttacttgtttccccaattcaagtgctgactcagctacaatcagaccaagagttaaaactccttgaccaccaaaccctgcaaatactagctctttttccataactattcaccatccctttgcttaaattcgccaagagcataatatggcactatttcttcttccatccatttgatagatttctctagtgatacaccccagttagttgggcaaggtgctaatatttcaactaaggaatatccctctccatttaattgagcttctattgcattttttatatatttttttagattaattatttcctttgggctatgaactgaacctcttgctacatatgctacatcaaagaagtttgccaccatctcaggaactttcagtggactaccagtagtctttatatctcttccatttacacttgttgttgtgacttgacccggcatagtggtccatgacatttgtccaccagtcattgcaaaattattattgtttattacaaatacagtcacattatgatttctatatgctgtatttaaagtttcagaaagacctataacataagcatctccatcaccttggtaagtcattactaatgtatctggaagtgctactttaactcctatagctgtagatgaagctctaccatgtgcagtttgcatcttatcaccattccagctaaaattcatattgcagacacaaccaactcctaatgttaatacatgatttttttcatatccatgttcttctattacctctgctattatacgatttactattccatgaccacaacctgggcaaaacttgtttggtattgaaacaacgctaggtgttaatttttctgtagccatattagaacacctccttgatttcgccagattttattttgctataagtgtccattacttgcaatgtttttggtatatgatttccactaaataaaccatacacaggtacattttctttacatactttctttgaggctaaagcaacatcttctactaattgacctgtgtctgttgattctactgagataaatccttttacatctttacttaccttttcaaatgctttatatgggaaaggccatactgttattggtcttattattccaactttttcaccttgttctctaagtcttctaacagcattcatagttgttcttgatggtataccgaacgctacaaacacatattctgcatcttctacttgataatcttcccattgttgttcattttcagttattctcatacgtttctccatacaaaaagttggcttttggttatctgcaacctttgcatggtctctattacttccatcataagtccaacctaaatctccttctctcttcttaaattctggaaattctactggttccatcatttgacctaaagctgcttctgtcaaaatttcgacaggcactctgtatttttccgctacatcaaatgagttatacatcaaatctacagtctcttgaatactgtttggtgcataaactatcaaatgataatctccatttcctccccctctagtatctcttagatagtctgtctgtgctgagtccaatgagccaagaccaggcccccatctctgtacatttacgattacacaagggtaatgatttgcacataagtaagaaatcccttcttgttttaaagatattcctggtcctgaagaactcgtcatagacctcattccacttgcatatgctccatataccatatatatagcagccatctcattttcggactgtataaaagttcttccaagttcagacattctatgtgataaaaattccattacctctgtttgtggtgtaattggatatcctgcataaaattcacaacctcctcttagggctgcttctgcaatggcgtggttccccttccacatctttttcatattatcccaactccttctaagcctcttgacatgctttttctttaattatttcaaaaacattatctggacacacctgatagcaaattccacaaagtatgcatttactctcatcaacttctacatgagcataaccttctttatttatcttacttgatatttttaatgctccttttttacaagatataacgcagtattcacaacttttacatctctctgcgtttatttttaagttcatatctacaccccgtttcataatatttctatctattatccaatacttggctctcctttaatatttaatatttcctttaaaactgctacaaatttcttattttcttccatagttccaatacttacacgtgcatgtgtagcacttggtcttattacaaaccctctttttttcaagtcttcaaataacttaggtatatctgttttcatatctacataaaggaaatttgattgtgaatctacaacatcaaaccccatttttgtaaactcttctttaaagtaagtcattccaactctatttaattcatatgtttcttttataaactcttcatcatcaagtgctgctgttgctccacttatagcaacacgatttgcagagaaaggctcttttactgtaaataaagttcttattatctcatctttagcaataccatatcctactctaagccctgcaagaccatatattttagagaaagttcttgttactataacgttataattttcccttacatacttaagtccatccacataattaggaactgttaaaaattctatatatgcttcatccaatatagttataatattttcagggactttctttaaaaattcttctaactctttatcatccacaattgttcctgttggattattagggttacatacacatattaattttgttttatctgtaatcttatctaatataccttgtaaatcatacttataatcttctgttaaaggcacttctactggtatcccttcattttttatagttgcagttctatatgatggaaatgttgggttacaatatataacttcatctcctctatttataaaagcctcacctattagagtgataacgttatccgcaccattagcaacaataaaattttctggttttaaatctagcttttcagctaattttcttctaagttcgttagcttctggctctggataaagttgaccttgttttagcatttcaatcatagcttctattgcttttggtgatggtcctagaggattttcatttgaagctaattttattatttcttttacaccatatttttccttaactttttctattggttcacctggaacatattgatgtaattcttttacggtatttctcaataatttttctatcatttttaaaagccccctctgtatatgtattttgatttatataaacgctattgcgtctacttactttaatagcttaaattaaccatctacttaactttcttttaactaagcatttctttgatttaactcttctcttatttggtttaatttcttgtcacttactggatatagtattgctataacaacagctattattaaaggtattgccatagaataagaaatcatatttataaaacctgatttaactgcttctgtgactaccatatcagcttgatatcccattgagttcattaaaactgttcttatagtagttgcaagtaatactcctacttgtattgcaactggatatagtgacatacttaagccaggtaagtcttttcctgatttccaatgcccataatcacaagaaccggcaaagaaattaagatttattattgatactacatttgaaaaacctccaccaattgccagcaacatagttactcctaaagtagttttcccccaaggagtccatgcaaccaataagtggcatagtgcacatatagaaaaagaaattattgaagctagtttttgctctctacagatttttataaacactggtgcgaaaaacatgaatgctacacttaccaaaggcatgattgataaaaatactgctaatccacgttcatcttctattacatatttaaaataatatggagccaaaggtcctaatcctatagatcttatacatataagaaattctaaacaaaatgccatcataagtggtacattagtgaatagagcttttgccatttcacttgctttaatctttggcttctcttctttttgaagaacttcttcttctgctccagattttattatctctgttgaagaaaaccaaaatactaaaaggcatcctgctgcaaagaataagtaggtacctaaataacccattccttctccacctaatacatctgcaaataaaactaataataacggatatgaaaaacctactaagaatttaccaacttctttaaatatattagtagtagttgagcctataactcggtctctaggtgtcttagcaactacagggtaaatagcataaattatagtgaaaactacttgctgagcacaagatgctattaataataaagctgtcatcaaaggtaaaagtaatgctggacttattttcattaatggaactatgaaaaatattccatatgttaatgctaacgctgctggtgcatatctaagccatggataatactttccttttttgaatggttgtttgtcaaatactgtacctgttataggagctacagcaatttttatgaaagattgtataatttgcataccacctgccataattacaccaagttttgccacatcagttaaaaaaatatttgtaacagttgatacaaagtaacctataaaattgtacgctaagtttatagaacttgaatatgtgtatattgctcttttcttagggtctctcatatcatctctaaaatttgatataagatttccttttggtttgctttcttgactactcacatctacccctcccttataaaattttcttacttttcattattcacgtataataatatatattttgaatcttaaatatctcattcttgattcaggagtatatttttatatgtgtataattttaatttaattatattcttaaaattcataattgtcaaacactttttaagttttattttttactactaaaattaactaaaaagctatttaggcttaatttagatttgttttttattattttcttgtcttgaaatgtcattgaaatgcgtattttaaattattttatcatatttctagtgattttaaatttttataattttattcaagaataatttattcaagatatttctatactacatccagatattaaaaatatctttttcttatttagattccttttatttttatacatgtactattgatttaaaaataaaagcgtgttacaattacaaaaaagaatctatgagataaatatcaatatgcaaaaatttcagaattttcaattttctatttttacgtaatttccatctaatatcataaattattatagctatattaatctaaaaccaataaaacaaatatcgtactacttttatataaaatatattttaaatatattttatatattttattaaaatattttataaaggagaaaagactatgttacttttaattgttacgtgtgcaatatacatatggattggtttttatttttcaaaaaaagttaaaacagcatccgatttcctaatcgcaggtagaaatcttcctttgcctatactagctgcaaccattgctgctacatcttttggaggagggtgcttagttggtggagttcaatggggagctgaaagaggactttgggttggaatgtattctactataggtgcagctttagcttgctttataaatgcctttttcgcaggaaaattaagaagcttatcttgtgatataacacctgctgattatattgaaactagatatggtcatagtgtatttttaagagcttatcaaagtcttgtaacaccaatatctatactagctattatgggtagtcaattaatttcttttggttctgtatctactgcatttggtattccttatgatatagctgtaattataggagttatagttataattatatatacttatacatcaggaatgtggggagttgcagtatcagcatttattcaacttgctatttgtatagtgtttttgccaatagtagcttatataagcttaaaattagttggcgacaaccctttacttatgttacaatcaatggtaaaagaaccattctttccaggaaataaatcgattagtgattttatgtatacagttttaccattagttttaggctcaatattttcttatgaaagttttttaagatatcaatgtgctgataatgctaaaaatgcagttaaaagtagtgtaattgcaggatttatactattatttcttgccttccctataggaataattggagctattggtggtagtttatttccaaacatatcatctgttcaggttttacctcaaatgatatcgactactttgccacctttaatatctgtattattcttagctgctatattggctgccataatgtctactgccgattcattaatgacctcaatgagtgctattatatcaagagatatttataacaaattattacatcctaatatagaatttaatgatttaaaaaatactctaaagtattctcaaattgcatcagctttgacagctataataggtgcaatcatagcacttaaatttgatagtttattagaattattgttttggccggctccattatgtacaggtgtaatatttgcaccatttgtaattggtctttgctggaaaggcgctacaaaaaaaggagctatctatgctgttatagtaagtgttatattggcattattaaatatgattggtattcttactgtatttgacagaattttggttcctataataggtggttctattacaatatttatagttagcaaattttcaaaaaaagattgaaaagagaggtatacacagtaaatatgtcaaaatcagaaaagggcaaagaaacaaaagctagtattataagtgctgctagagaattattttttgagcaaggttatcataagacaacaactaggcaaattgcagaaagagctaatataaatttaggtctaataagctattacttctcaagtaaaagcgaaataggagctataatatatgaagatataagaaatgaaatgcagtctttaatctataactaccatgaagaaggtactatgatgatgttctttcttgctatgaatgctgacctttgtttccttctaaaaaacgaagcatatagaaatttttatttggatatagcttatgaagaagctattttaagctatcaaagaagtgtaaccgaaatggtcatgaaaagatatgttaatgataaagaatctatagaacatgatgaattaatactttcttgtattggtatacttgctatgaaacctgaaataattagagtttatacttcacacaagtacgatatatcttctcaagctgtaataaagcattttacaaaacagtttcttattaatcttggtcatagtacggatttatgcgaagagattttagaggaattgagtaaatactatatagatatagttgacaattttactccaataataactcgtgtaagaacttaataaaattttattaaattcttatagactgaaattttaaaatcataatttgattttaggatttcagtctttatcatatttaaagatattttatagtatacctgttaataccataagtgtactacccaattatatctataaatttctttatccataaattccaaagacgccattcatgcccccctacacactcttcatattcaacatctacacccagagactctgcatattttttaaacatctgattatttttatataaaaaatctctatcaccacaaaattgataaattttaggaatatcttcatttctttctttaaggttcttaagtatgtaaagtaaatcattctcactatttctagcgtcttctggtctaccaaaatcgtgaaataaaatgtctgcattggtttctatttgttgattttctaactcatgaatcatatcaggcgaaccagaaaaacttgcaactgccgaaaactcttttggttttgaaagtgctaattttaaagctccatatccccccatagacataccagctacaaagttatcttcccttttatctgataaaggaaatatagctctaacaaatttaggtaattcctcgcttacaaaagtaaaatattggtgtccatacgccatatctgtataaaaactagtttctactcttggtattactagggctatatttttatttttagcataatgctctacattagtatatctaatccatgagctttggtcatcttctaaaccatgaaataagtataatgttttaaatttaccttcaaaatcatatatctctttaccactaaaaagttcttttccatttgctacaggcaaaattacaattatatcagtttctcctccagtatatttagatttaaatttacattctataaatgccacaaaaaacacctcttctataataattttatatctaaaaagcaccaagagtttaactttctcagtgctttaaatattgcttaatttatatatttttaattatacataatattttttagctacatgtaatcggaagtatctgtcggtaatccctttttgtccaatttactttcaacaatatccttaattatagaataaattactgcaaacattggaactcctataaccattccaataaaacctaataattttcctgcaaccaataaggagaacaaaatccaaaatgcagatataccaattgaatctccaagtattttaggtcctataatatttccatctatctgttgtattattaatataatcaacaataaccagaaagcttttataggagatacaaacatcactattagagtagatggtatagctccaaataaaggtccaaagaaaggtataatatttgtaataccaattataactgatattaataatgtatatggcattttaactaatgtaagtattacaaatgttagaatacctataatgaatgaatctaatattttgccacctaaaaatcttccaaatgtatagttacttctatgagttaattctaaaattctggcagcttgtttttctgtaaatactgcataagttatttttttgcttaatccatagaatttttctttatcaattaataagtatactgaaacaattaatcctagtacaatattccatatactagaggctacattctttaacatacttcctaatattgggattaaatctgttacaaactttataatatatgtaacaaactcattccacttatcaactgccaaattaaagtattgctcatcaagatttaaatcagtcattaatttatcaataagcttagttgcattgtttacatacataggtatatcatttgctagtccaacaatactctcaattacttgtggcaatacgaaatgcataaataagtaaagtatcaatgtagctgttgcatatgttaataaaagacccaagcctctttttgaactttgttttagtttttttaatttctcactttttataaaaattctgtcttcataaaactttaaaataaaattaagaagatatgcaatagcaaatcctattataaaaggttgtaatgttgtaaatatagcatctaaattattagaaaatacatcaatttgtgatgatactagataaaatataatactactagcagctattataaatgtataaattgctattgttgtgtattttgtattccaattaattttcattttttcctccttatttctatataattaaattttatcacaaaatcaccacttttataacaaatataccaaattaaaaataaaatatattcagaatacaaatactcaattttatttatatttattattctacaatataacctacattatctttttaagaaccttaattaatttattatcgtatggagcatatctaatagggacatccaaatttaatttttttaacacactcttatagtgagtaaatgtatcgaatccagcttttccatgatatgagcccataccactttcaccaataccaccaaaaggtaagtaattcgtagctatatgagtaactgtatcattgatacaacatccgcctgctggaatcatttctaaaagtttattttctaggtacttattttttgtaaaaatataaagtgccaatggatttggcatttgtataattttttgtattacttcatctaaatctttatatgttaaaatgggaaatataggcccaaatatttcttccttcattatattatcatcccaattaacattgtctactatagttggctctatctttaatgtctccttattataatttccaccatagactatcttatctttatcaataagagataatatccgattaaaatgtctctgatttatgattttaggaaattgctcattattacatggattatctccaaaatacttattagtataatattttattttctctattaactcattttttctatcttcatgcactaaaacataatctggagccacgcaggtttgtcctgcatttattagttttccccaagtaagtcttttggcagtaaggtctatattagcatcttttaaaatgatacaaggactttttcctccaagttctaaagtaataggagttaaatgctctgatgctgatttcatgattattttaccaacattagtacttcctgtaaaaaatatataatcaaatctttccaatagtaacttttcactttcttcttgacttccttgaacaactgcaacatattcttttgaaaaagtattttcaactatgtctttaactacactagatgttgacacagaatattcagaaggttttaatataacacaattccctgctgctaatgaccaaactaatggtataagtgctaattgaaagggataattccaaggtgacattatgagagtaacaccataaggttgtggaacaactttggatatagatggaaaattaaccatacttgatttaactctttttattttgctccattttcttatattctttatagcaaagtttaattcactataaaacatgcctacctctgtcataaaaccttcaaaattcgatttatttaaatctttctttagtgctaaaagtattttttcttcattttgtgatacaactaacttaagtttcttcaactgttctatacgaaacgatatatctcttgttttacctgtattataatattttctttgcattttaactaactcttttatatccattgttaaaaatcctttctttaagaattatattaatacatttttagaaaaagatttaaatttatcctaacattattttttatatcataataaattcatctcaatataacataaatcttccaataaaaaaagccccttattaagtataagtaagcttataaaataatttattttaaaataaacattttttaaaattataaccttattgaaacaattaaattatccatctttaataatattattttataaataatgtctagtaagtttctatgaaatctaactttagataataaataattataaatatatacctcttaaagttttcttatataattaagtattggagttaaattttctttattacaccaatcaaaggcttctccagacaataaaggtgcttctgctggtttaagaccttgacgttcttttttagctatagattttttaaaaaaactacaaagagtataatctataaaagacatttttgtctcatcccatgccccacgacaataaaagcaaggaactttgtttaattcatccttaaagtttacttctcttaatttctttattacttcatcatcatatggagcagctcctacgccaaatactactaaattttttttctgcaaatctttataatttttttttaagaaagaaattcccgctatattacaagcataaagacctcctcctaaaataatcgtatcatacttcataaccttttctatattaatattcttagtttcaaaaatatcacaagacaataattctgaaagccatttagcatatttttttgttgaaccatacttactcttataaatcactactacacttttcatataaattacccccctctctgatgtcatacaaagttgatttgatacttgcttattctccaacgtcattattttctacataatttttcacattttcaattcctatacttaatttcataattccaaaaaataactgttccacttctttctctgtaaaatcttcaaataaaagctgtaatactttttcctgcatacctcttacttttttagaatactcttgcactctatcttttgtcacaagacagatagctcttgaatctttttcattttgctcaatttgtataaaacctttcttttctaaagcaatagctagtttttttacattttgtcttgagcaccccattaattctccaagtttggttaatgtaagagtttcatctacagagtccgcaatagctaaaagtaaccattgtttcattgttaattctgggtctaatttatcacatgtagtttgaagtttattttgcattacaaatatacttgcaaatatagcttgttttctactatcatcatctaccatatattttttcattaaactttctgcatccattattatacacttctctttatcttagattttaattttttgataattttaaatagtaactagttactttatattatagtaattagttactattgtgtcaataaatttatttttattataaatggcaaaacggcatagcattatggctataccgtttcataaaatcatatttacaatcaatttataataaattataaattaaatatattttaggctataataagtttttcaaaatttactctaaagcatactttttatacttattatattctatattgctacattctacatctaaaatagctccatcttctctgtattctgtatttataatgctcgtattttcgttaaaataagaaactacatgacctttatcatatggaattaagaacttacatcttacacaatctttaaatatgctatcacaaatacattttatcattttatctatatttatatcttttttaactgaaacaaatataccttctttatcgatactatctaaaattctatccaatacttctacatctattaaatcaattttattatacacatgtatcataggtataccatctgcacctatttgttttaaagtatcttctgtcactttaatatgacttttatagcttggatttgaaatatcaataacatgtaacagtacgtctgcctcacatgcttcttctaatgttgacctaaatgcttttactaagtcatgtggtagattacttacaaaaccaacagtatcagataataaaaattctttgttatttgcaagaactatatttctgacagaagtttcaagtgtagcaaataacatgtttttctcaaacactttcttttcttcagagtttttaaatatatctactagtttattcattattgaagatttaccagcatttgtatacccgactagagctacatttggaagatttgattttcttctcatacttctttgagtttctctttggaattttaaatcatacaactccctatttaaagatgttatcttttcttctattcttctacggtcaagttctaattttttctcaccagaacctctatttttagtaccaactccaccactttgacgtcctaaattttcatttgaacctataagtcttggtaacatatattttaaacttgctacttctacttgaagtttagcttctctagtttttgccctttgtgcaaatatatcaagtatcaatgccgttctatctataatttcacaattaagcttttcttcaagattttttagttgtgatgtagaaagttcattgtaaaatataactatctctatgttttctttctttattaagtttaatatttcctcaactttacctgtcccaatgtaaaatgctctattaacctgctttgcattttgagttatactccctacaacatcaatatcacatgctgaacataagttttcaagttcaatcattagttcattaaagtcctcagatttattatttatgtttaatcctactgttattccttttttcgtcatatccatattctccttatctgctattttttatttaatctatagcacgagattatggctctataattaaattcatcaagaattttgctttttatcttatccttaaatgacacttcttatttactattataataaccataatcgtgcattattttctcaatcttatataaaaaatcactttcttacacctcctcccaaatatattatgcagttttttcaataaaaaaactccttacaaatctaagtaatacaaaacaagctacttatatcataagaaggattaaaattctaaatatatattaaaaatacattagtttaattaacttatatgtaattatcattttatatttaaccctattcttaaatttaagtagttatttgcatgattaataaaagtaataaaaacatatacttcaatataatcatcaactattaaaattaaattctatttataataaaatttaaagaataaaattaaatatacattttgataatcacctccaacattttccttactacatattataataaaataaacactttgtaaagacataaaattatgtggctatctcaaaatatagataatcctctttttcattgttaaaatgataaaaatacactttatttcatacacaaaagagtgccttatgaattaaaaagttcattttaaggcaccctcatttattttatcttattaattacatgtctatgctaagatagttttttgttacattgcttcatcttcttcaaattgagaattgtaaagattggcatagaatccgcctttctttagaagttcctcatgatttccttgttcaactatatctccttcattcattacaagaatcatatcagcatcacgtatagttgataatctgtgggctataacaaaacttgttctaccttccataagattatccatagctttttgaatcaatacttctgttctagtatcgacagaacttgtagcttcatctaatattaaaattttaggatcagctaaaatagcacgagctatagtcaataattgtttttgaccttgagaaacattacttgcttcttcatttaatttcatcttatatccatctggtaacgtcttaataaatctatgaacatgtgcagatttagcagcctctataacttcttcatctgtagcattcaacttaccatatcttatattttccataattgaaccactaaataaccatgtatcttgaagaaccataccaaacatttctctaagctcactacgattaaaatctttaatattatgaccatcaatcagtattgaaccgctattaacatcataaaatctcattaacagtttaactattgtagttttacctgctcctgtaggtccaacaatagcaactttttgaccaggtttaacatttactgagaaatcatttattatagtcttgtttgggttatatccaaagttgacattttcaaaatcaattttaccttctaaaccatctattgaaactgcattttcaacaatttggacttcttcttcctcttctaaaaactcaaatactctttcagaagctgctgctgttgattgcaataaattggcaacctgtgcaatctgagtcattggctgtgtaaagtttcttacatattgtataaatgactgtatgtcaccaacctcaattgttttcttaattgcaagccaacctcctaagattgataccattacatatcccaagtttccaataaacatcataagtggttgcattatacctgataaaaattgagatttccacgctgaattatacaggctatcatttagtttatcaaactcttcaattacttcatcttcacgattaaatgctttcactattgtttggccactataagtttcctcaacttgaccatttacatttcctaaatattcttgttgatatctaaagtatttttgtgatttctttattattcttgaaattacaaacattgatattggtaatattaaaactgccactaatgtcataattccacttatagataacatcattatcaaaacacctatcatagttgttactgatgttataagctgtgtcatactttgatttaaactttgatttaaagtatctatatcattcgtaattctcgataatatttcaccatgcgtcttagtatcaaaatacttcattggtaatctatccaattttgctgaaatctcttttcttaaattataggatactttttgagaaattccactcattataaatccttgtataaaagagaacagtgcacttatcaaataaaggaaaagtaaaaaggttaagatttttccaattgcattaaaatctatacctacgtttcctccagaaactttactcactaacccttcaaatatctttgtagttgcctttcctaaaatttttggacctactatagaaaacgatgcactaccaatagcaaatacaattactaaaattattgatattttaaatttagataaatatgcaattagttttcgcatagtccctttaaagtcatttgctttttgtcctgcttccatagattttcccataggacctcttcccattctactcattagctagctcctcctttgaaagttgtgataaagctatttgctcataaacttcgcaattttttagaagctctttatgtgttcctattccaactatttctccctcatttaaaacaattatctgttctgcatttaagatagtactaattctttgtgcaactattagaactgtactttcagcagtttttgattttaaagccttacgaagagctgcatcagtttttaagtcaagtgctgaaaaactatcatcaaatatataaacttctggattttttgctattgctcttgcaatagaaagtctttgtttttgacctccagatacatttgttccaccttgagaaatttcagttttaaaagcttctggtttagaatctataaattctgtagcttgagctatttcagctgctgttctcatttcttcatctgttgcgtcttttctaccatattttaagttggattctatagtaccagaaaacaatactcccttttgaggtacatatccaattttttcccttaaatcatgttgagaaacattttttatattaactccaccaagtaatatttctccttcagtaacatcaaagaaacgaggaattaaatttataagagttgacttaccactaccagtacttcctataaaggcagttgtttctcctggctttgctgtaaaagatatatttgttaatataggttcttctgcgtctggatacatgaacgaaacatttttaaattcaacaagaccctttttatcttccttaaactcttgtgcctctgatttttctgggtcttttatgcttatatctgacactaatacttcatctatacgtgtagctgaaacggatgctcttggaagcataatagataccattgatatcattaagaatgacattattatttgcattgtatattgtataaatgccatcatatctccaacttgcattgctccagaatcaacactgtatgcacctctccaaactataagaactgtgataaggttcattataagcatcatagcaggcatcatacatgtcataactctatttacaaaaagatttgttttagttaaatttttatttgctttatcaaatctttcttcttcatgtttttcagtactaaaagctctgataactggaataccagtaattatttcacggcttactaagtttaacttatcaacaagcttttgaaccagtttaaacttaggcataaccactgagaataacactacaattaatgataagatagcaactactgctactgctataatccaggccattgaagtatttgtgtttaaaacctttatcactccacctatagccattataggtgcatagaatactattctaagcaacataaccatcaacatttgtatctgttgaatatcatttgtactacgagtaattaatgaagctgtagaaaattcattcatttcagtatttgaaaatgacataacttttctaaatactccacttcttaaatttctacctacacttgctgctactcttgctgctaaaaatcctactgttattgtagctaccatactaatcattgctataccaagcattttagcaccagtaaataatatataattattttgagttttttctgtatcaatacctattttctcatattctgaccttacatatgaaacagagctttgtgttatcatactctctggcatactttcaaagcctttgctcatctctttagtcaatgtatctaactgttcctttggcattgctgataacaatttaaatatatcaacatctccactttgagtagcttgtggtggaagtttactcattaactgagctttcatagcttttacctctttactatcgccctcaagccctgatactattaaaatagctttaccaaaaataacatttaaatcatctatagtgtctttgtctttagtatttaactcataaagagattcatcttttagacctgggtacttatctttatacttaacataatcctttttattcagcaaagtataattatctagtactttatccttactacttttatccataaataaagtaattttatttaattcactctctctaatcacagatggaacagagttttctactccaccttgttgtatacctacatttactatattggatgtgtattctggtaaagaaaggtcacataccgcttgaattaccaatagacagactattattactattgataatgccgatttctttaaatatttaattaatttaaacatacatttcttcccttctgtaatattaattagtctaataacattaaattgaaaaacattattttaaactttaaaaatatttttcatcttcatgcttatgacatcctgcttttaaattatctcgtacttgcattagaagtcttctaagtactattttttcttcttcactaaatcctaaaaaaaactctctttccaattccttgttaaattcttcaactttattacatatttctaaacctttgtctgtcaaaaaaatcctagatactctttggtccttttcatcttgttttctttccacaagtccagctttttccatcctctttatcataactgtagttgtagatgcttttactttccttttatctgctaattctttttgactttgcccatctttcatctttaaagaaaaaagtatttggggttgaccatgatataagcctaatttatcaaaataaaaatgagttcttataaaatatattcgcattaattgcaagaaaacatcatttaatttttcttcagaattgctattcatacttgccctccttattttttatattacttagtcggctaagcattattttactatactgcatgcattttttcaatatatttataaaaaattcatataaatttcatttattaaatatttttatatcatatagttataattttaataaataatagtaagatttttaattagtcagctacttatattttttattgtaaagcttaaaataaaccttttcatatattttcaaataaaaaagttgtcccaaaataaattttgaaacaacatcatattcaacagtatcttgattatataacattacaatactctacttatcttcatatccatttacaacaacgtctaacttcccagtttcaggtgatataattagaccatgtacaataataccatctggaattaaaggatgcccttttattaaatcaatactatcttttacagattcttctgcagaatcgaatccatgtaaccattgttttgtatcaattccagcactacgaagtgtaagtattacatcattagatattcctctatctaaaattttaccaagtaacttatctgtatcaacattacacataccacatccatgatgccctacaaccataacctcatctacatcaaattcgtaaattgcaactaaaacacttctcataatacttccaaaaggatgcattatagtagctcctgcattttttattagtttcacatctccatttttcaaattcatagccttaggcaaaagctcagttaatcttgtatccatacaagataagactactatttttttatttggatgttttgatgtcacatattgttcatattctttgttctctacaaatgatttattatattctaatatctcttcaagttttctcatatgtaatatcaccctctttaaaaatttttttattattatatcactattaaagtacaatatatacacatataatttaatttatatttattaaattattttataagattattactctactataaatcttgtatataacttgtatttataagtatttgtatatttattttttataatctaaactaatattatatattttcattatttttttaattataatttttttaaaattttattctaaatgccttacttataattaattttttatttcacctatatataattagatttaaaaatgtttaccttaccaatataatgattaaactcaaaagtcttattgaaaaattttctatttacataaattgttcaatatataaaatagaaaatttttttaattttcaaaatatattctacatatctaatatgtaattacaataaaaaatgctataattaacatattattaattcgttttattattgtagtatggctatgaaattatgaaaatatttctctaattaaaaatatgatttatccatatttgtttattgtagatacagactatacaaaaataaatagcacttatttcagtataaaaacatatatagtctatatttagactaaaaaagtataaatagtctatataaaacaacttaaactatgaatataatctaaagtggagggataataattggcaaatataggaaaaataataggagatagaataaaagtctatagaacaaaattgggatatagtcaagagtttctagcagaaaaggcaggtttacatccaacatatattggtcagattgaaagagctgagacaaatacatctatcaatattataatgaaaattgctactgctttagacataccacttgaattgttatttgcaaatattattacaacagaaggcgttgataactctgtacctttagaatgttatgaaatgattaataaattaactgaaaaagaacaaattgcaatgctagagttaataaagtgcatcattaaatacaaagaaatataagtgagggaaatagtaacaataatgaattatataggtaaaagacttaaagaagaacgaaaaaaagcaaatttaacttcaaaagaatttgcaaatatggttggagtatcgccttggtatataactcaaatcgaaagtggtaaaaagaatccaagtcttaaaacattcataaaatttgtaaatatattaaatatttctgcagatgttcttataaaagatattacttccactggaaaaacatatttagaaaatgatataaatgaagagttaaaagacttaaattcaagagaactaaatctgatatcacagattatagacatcataaaaaagaataaaatataattctttatattttatataaaaaaaaaggttatttgaaataaataacctttttttgtctttttgtgttaacattgtcttatagtgctaatgagtactattagaccatgttctatggccttattttaatataaaacgattggagataggctatgattgtgattgaaggtagtgataaatttaagattgcaaaagaatatattgatgtagaatatactctttttagcaaagtaacttttaggtatgaaaagttgaaatttaaagataatgctgaattggaaaaaattaagatgtttaaatataaaaatggctacatccctaataaattaaacctttcttttggatatggattctcttcttataaaaagcaaataattagagaaactgtagatactttaagattgacagaaattttttcaagcgagaacatagaagatattaaatttataaaagatggtacaaaaaaattagaaattagcatagagaaagttgtgaaatttaaacgtcgaaaaaaaagaaattatgtttgttgctattgccctgatatgtatagagatataaaactcgacaaagaatctatcaataagatatacaacagaaaaataaaaatagaaagagaagttaatatttttgaagatgaggatgttataataaacaagaaagtattgaagtttccaaagtcttggacaaagaatatgcaaaaatattggttaagtgaaaataagtatcccatacattctactgtaattgatgatgatagatataaatgttgtaatgtacaatatacaaaaaatagagtgataatattatattacatatataaccattaatatacataattacaaaaaaataatgacaaatatacataatacaaatatatcttctactttagataaaacagttattatgaaaacttactatctataaataatagaaatgctagtataccatctataatctaatgtctagtaggttttaatggcatattttaaatatgccatagttgatttataagattttctatatcactttcaaaatacacactaaatagttgcttttcagatataattgcccaatttaaattttactatctgaaaagttttttatatttaatttatatcttcaaaaataccgtctaatatttctatataattaatttaattaatactcttatgtaatagattaagtactgaatttaactctttaaatgatatttgccctggtgctgaaacactttttgcagctccaaaagtcaatgcagaaccaaatatttcaccacacaatctacttataacacccattcctgacattgacattgttattattggtctatctgcataaattttaaacatttcatttgtagcttcaagtagcactaacacatctctttcattttgcggcataacagctactttgggtaaatctgcgcccaattcctgcattctacataaacgagatacaatctcttctttttttggagttttattaaaatcatgattagatataattactttcacttcttttttatgagcaaaattaactacttcatctatgacctcatctcccataaataactctacatctattaaatctactaaacctgtattagaaatttctttattcaaagtagtataataatctcttgatattaatttttctcccccttctactacacttctaaatgtgaataataaagggatatcatgtatataacttcttaattcatagagaacttccttaacttctttaatattttctacattctcaaaaaaatcaactcgccactctataatatccaaacatgcatcttttaactctttagcctcttttataatatcttttttatttttcccaataattggtacacaaattttaggtctaccttctccaatagtaatattttttacttgaacttttcttttcatattctcctccataatcagaaattctataggactttaaattctattttctgcataatttaattatacattaaaaatactatacattataaaaatactaatttaaaaataatttttattctaattcttaaaacaatcccacatattttagaaaaggtactctataatatacaaacacttcttttttacctaaatttattttaacattctataattttcacaatattctttaaattttactcatataaacaatattattctggatgctaatagaattaatctataaatcatagtataattatgcagaaataactcgaatttcactacttataaagagattgaatattaatgaatctaaatcatttgcattacttcagagttttgactaaagttgaacaccatacaaaagtagctactcaattgtttataccccaaccaagcttaagtaatgttatatagattcttgaaaaagaatttggtatctttttatttgaaaaacaaggtagaaatgtttccctcactaaatacggaagtttttttctaacctatgttgataaagcattaggttaattagaaaaagtttacatataaaatatattaaattgttgcaagttttattgttttgatatacaatcaactaaacatataatctttataaaatactatacagttaaaagtctgttttaaaaaaaaatgtataaattataaatcaaaatatagatactatcaaggagtgattctgtgaagagatgtattgtagtagtggaatagtcaaaaacataatatatattaaaggagagatttaaatatgactattccaaattcaaataaggtatatccaagaagtaatgattatcaaactgtatatcttaaaaatgtaataacaagggaaaatatagaagttggagattacacaatatataatgacttttataatgacccaagagattttgagaaaaacaatgtattatatcattaccctataaacaatgataaattaataattggtaagttttgctcaatagcatgtaatgcaaaatttctaatgactagtggaaatcactcaatgaaatcaaaatccacatatacttttcccatcttttatgaagaatggaaactcgatatcaaccatataacggacgcttgggacaataagggtaacattataattggaaatgatgtgtggataggttatgattctataattatgtcaggtgtaaatattggtgatggtgcaattattggaacaagagcagtagttactaatgacgtctcaccgtattctattgttggaggagtacctgcaaaaattataaaaaagagatttaataatgatacaatttcaaaattattagaaattaaatggtgggattggccatataaaaaaattcaatcaaacattaagcatattcaatcaggaaatattgataaattagtttaatattttataatttatttatattaaactttactttaataatccttttataagagctttttcaaaatttgtatattattttaatatatataaatttaatacaacattaaataaaataaaaagtaaagttacttaataaaaagttactttactttttattatttaaattcctgtttttattataataggtaaaattctattaaactagttcacattttcattattattgatatattatatatgaatataccattttgttttttaataaaaaaatcatgctacatcagtagtaagcaactattaatgtagcatgattttttgtatctaaataatcttagtatttacctatcaatatagattgatatatcaaaaactatagtcttctatattcttctctttttagcttttggttacttagatagtaatcaatttcatcaattagacgttgtttatcatcaggtaatacaccttttaaattagcataatttgatgcatgattacttctaaatacaattttttcattagcatctatattctttatcatctctttaatttcttgtaacacagccttatcctctagtattgtaaactctcctgccttaagtaaatcgtaaagttcagtattaggttctaccattaaactaagtacacccacataatctggtgaaattgctcctaacatttttcctgtatcaactgcatgctgatgtgtttttttagttcctccaagacctgctattacagtggctgataatttaatcccactttttttaacttttctaccaacttttattaattgttcactactaaaacctttcttaatatcttctaatacttcattgcttccactttcaagccctagataaatcattttaacaccaagttttcttaattctttaagttcatcatcagattttttctctatagatttaggagagccgtacatagtaattctttcacactctggaaaaacttcttttatatataaaataatatctcttaatttctccattggtattatcaatgcatctccatctgctaagaatattctttctacatgcttataatatcttctaaatatatcaatttcattttttattacttctagtggctttattttaaattttttagatttgtacatactacaaaacgtacatttgttatgagaacatcctagtgtgacttgtattataagactataagcctcacttggtggtctgtaaagtggcatatcgtattccatattaaaatcccccttgtaataaaatattcattctattatattattaatatttactttaaataataacttataaaattatattttttaaattttagtttaagatatattctttaaaaatttaatgatactattggcagtaatattaagttgtttttcttgacttataatagcatcattatctcccttttgttttccatagtctccaaattgtgcatgatttcctccttcaatctcaacataagttgtatcatcaggaagtttttgttttgattctacaagacttttaaaattgactactccatctttgctcccccatatagatataactttttttcctaattctttcaactcatcacccattggataagaagctaaaaatacaacgccttcaattaatttattatcacgtgcaaaatttgatgctgcaactcctcctaatgaatgacctcctattacccaatgttctatgttgttgtaagaatccataactttctgtgccttattagttccaagtatagctagattaagtggcatctttacgattacaacctcatatccactttctgctatttttcttgcaagtggagcataagattctatttctactttagctcctggatacaaaattaaacctttagaaacttttcttccttttggtgtaaatgaaatgttttcatttacagttacttcaactttactattgctgactagagcttcttttgccagcttttgaggttcatatgttttatttatccatatgaaaaagccaagcaaaatcaatacaaatagtatacctattcccttaaatatcttattctttatgttaaattttctattattatttttatcatctttgttctcaacctcatcataaagtaaaggtctctcaagttccatagttatactaaatgtatcatatttcttattacgctttacctttacatctttactcataaatctaacccccataatatttgaatactattatagtttatcctaagtaaattgttttttcaaccaatgaaaaaaatcaatattttaactattttcatataaaattcataaatatatgttttttgttttttatatattattttcttttagtattttataaaacaaatagccatatactttattttaaatatatggctattctataatttaatatctaagctgcttcttttattgaaactttagttatattacttattctatacatttctttgacaccatttagagtttgcagtaagtttagacatattatcttgtcacctagacttttagtatttacaatactctctaaaattacacttcttccttcatcatacttatctacattgtaatttgaaatataattagtatctctcaatattttttcaacatcttcatcttttattttatttttattaacatttatatatagattatacatattacttattagtaatttctgattttctaaaaaatcctcttgatgtttatctttatatatagcatttatcaacataagtctatcttcaataagtgatggtatcaataataaattttttatatagtaaacatcagctacattttctatagacttattgacttcatcaattatatttttaactattcctttatacatttctataacatgttgatagcctgttttagcatcatatggtaatataaacttatttactattaatgcaataattgctcctaatgctacatatgaaatcctgcttatggttaaaacatttgggtctcccataactactgctgaaccaagagctgaaacagttacacataccattaattttctataatcaactacataagagtttatataccctgctaaaagaactattaacgaccttaatgtactatcttttattattgaaaataatacaataaatattacagctcctataaatgtaccttctattctttttctagacctttgtatacaattttctgcgtaaggttgtgttaatgaaaagacagttaacattatccatcttccatctcttaaatggaaataatccataataaaacccgctacagctgtagctaaagcaatctttactgcataagaaaatcttatagaatttaaattaaagtttttcttatatattgatagtcgtttaaattcatgaggtatctttgattttctttcagctttcttttcgtctcttgattttacttttttataatctactaaaaactcatataaattttctaaaacactataaatttcttttaaatttatatttttagtatcctgagcaataacataatctctaaatcctaatatctctttatcagttatggtatctttattttctaaacacatcttaatatagtttatttctttcgttgctacaactagaacatctgatttactatttatgctactttcttctaaaatattttttatatcttcatcttcaaattctttactatcctttttgtatctttccatgattaaacttattctttctaatgaaaataaaatattcattatgtctatacctctaatactgatataaaagtcatcttttctattatcaaaaataaccattttcaaatttttagatatagaatttattctataattacagctatctatttttctcatactagatttaattatagaactatcatcattaatagtattttttaaaagactaattttttctaataattcatcacatatagatatcagttctttatctccgacatttttcatcctatttctattcataacaaattgagcaatcattattataactgctccaacagctaaagccgacaatctcataggaaattcactttttcctacaggtatacttaccataaatatatacattagaccaaaaggtacatatactgctctctttaagtcataactaaatacataccctattataaataatgctataaaatttaataaaactcctaaatacatattttgtactgcaaaaaatgatagtattcctaagattatatttattgctaaatacttcagtaaatttttaattggagaaatagttaaatctctttccaagagtgttagcatagctgttactatacctacacctataagtgtatttttacttccaaataaatatataaatatagaaataaatgctattataaaaataaacaactttgtttttgatattactagtttctttgtcatcatatcccccctaaaaatttcaacaagaccaattttatcatatttgttatcttattcaaaatgcgcttttttacggtaggactttaactttttttatatttagaactatataattcatatataaacgtattttttttatatataaccgatatattttcgtatgctcccatattttttttgtttcaaatattttttcaaaaatataaaaataactctctcaataatactaaaaatgtatttatcaagagagttataatttatacaataaatttaattaagcttttctttacctaatatataagttccaagacccataaataaagctcctccaacaatatttccaagtgttacagctactaaattataaatagctcctccaatagtaactgtacttattgttggtgaaaataatgaaacactataaattgtcatatttgctacactatgctcaaaacctgatgttataaaagcaaataaacataagaatatcataattatttttgcagtatcactattagttctaaacgaacacaacactgatacacatactagaatattacataaaatccctctaaagaaaagagctgtaaatggcatggatgctttactagctgctgtatttgcaaaaaattcagctacaggtcctttgtctactagaccagttcctacaaatataagacctaaaaccaaagctccgattaaattacctacccaactgtatgcccatattttagaagtatcttttatacttacacctttatttaacataccagcagacataaccatattgtttccagtaaataactctgttcccgtcattataaccaaacttagtgctattgcaaatgataaccccattactatcttagtcataggtgaacctgcatcagtcaaaagtcctcctatagtaaatatcaaaagtatacctatacctacataaagtcctgcaaacgcagaagataccaaatattttactttacttgtgtttaataaatttatcttatttatagctgcattagttaatttatccaaagtttctttatgcataattccctcttccttctattaaattttaatttattcaaatatatgttttactcaatttatagatatttaattccactccagtatatgttttcgtacattttagttatttctggaagctctacaccttcaagtgcccattttttaaattccataaatcctgttctatcaattatatatcctatatgttcttttcctcctggtgcatctttatctatatacttttctacatatctataagtattaagtattatctttattatgctgtcctcatctacccataaaagaaaatcttctgctagtctagggtttttctttcctgttctacccattatagctaatctatagtattttttctcatctctagtccatgcatttgttgggcaatttagtacacactctccacatcctatacacttatctttatctcttaccaccttattattttctgtttttaatgctccaacagatattttagaacatttttttacacatgctccacaatttacacatctatctttttcatatattggtaaagccataccaataattccaaagtcattcattctagcttttatacaatcatttggacaaccagttaaagccactttaaaatgtaaatcatttggaaatatagctttttctattcttttagcaaattcagttgtattatattgagcctttggacagactttatttcctatacaagctgctatatttcttgtacctgctgctggataacctgcgtttttctcactttgatttatattcattttttcaataacaggttgtataattttatttatttcttccatatcttccatatttattcctaatatttcaaacccctgtcttgtagttatgtgcacctgtccatttccgtactcacttgcaattttagaaactacagctaaactctcagggtcaataagaccaccaggtactctaactcttaaagaagtctcatattttgtttttgtaattctataagcatttttcattacttttttggtatttaaatctcttatcacaaacttcgccccctaatcaataagatttttagcatatgaataatcaaatactggtccatctaaacatatgtaagtatcatccattttacaatgtccacatttacctattccacaacacatttttctttcataagaaacccaaatgttcttttcatctaaatctctttttaaaaattcttctactgtaaatttcatcatcattggaggtccaactacaactatagaagtattgtttatatctttcatatccaattctggtatgtattttgttactaatcctacattaccactatatccttcctctgctccatctacagtaactaaaatatcaagttttttactccatctctttaaatcatctgcaaataaaatatcttttggtgatttaaatcctactattaatttaaacttttcgcatttttctttattattataaaaatattcaactattcctcttacaggggctaatgcacttcctcctgccactactacaatttctcttccttcataaagggatacatcaaatccatttccataaggacctcttataaaaaaagaatctccttctttataattaaacaactcgctagttacttttcctacatttcttattgtaaagtcaatataatcctctccatatcctgatactgatattggactttcaccgtatttaggtatagatatctcataaaactttccaggcaatacaccttttgtattgcagtttactctaaaagtccattctttatcagtatgtttaactatatctagtatttttgcacttactggtatatatgggttcatttatacttcctccttactaattactaaatcatttattttttctatacactttgaaaatgatatgtattgcggacaggcatcatcacatcttccacaaccaacacacatatgatatccgaatctttttttaaaatcatgtattttatgcatagttttaaatctcattctttcaccttgtttttttctaaaagaatttccacctgctatatctgtatatccatctacttgacaagaagcccaaacccttcttctctcacctacattttcgttttccttatagaaaatatcctgcattgtaaaacatgaacatgttggacatacaaaattacatctaccacatcctatacatcttgtatcatattcatcccatattgaatttcctataatttcatttgaatcaatattctctggcacatctacagatattaaattatcagttacataatcaacattaaattcagttgcttctccattaaatacttcaaattcactatcctttatatctaagtacagtgtatctccttctatatttaatccaattgaataattatcagttttgttagaatccatgctcacacaaaaacagtttctaaaactttccttacaccctacaagtgcaaactttactttatctctgatatttttataaaaataatctttttcttcaccattatttagatatatttcatcaagtctttttataccatttatgtcacaagctcttaagaaaattaaaattttcttgttgtctaaatcgctttccttaaactctttttcagtaaaataaaacaatacttgatttatgggaagtacaacttcttttggtgaaaagtttgctttcttagcaaattccatttcttcaaaagcgtttacctccttgtatcttataacatcagtatctgaaaaagtacctttaaatgggattaaaactggtgcaaatatcttgtagtctttttttagataattcagaccttcattgaacttagatgaatctaattttagtttcatttttatcacctttcttatattttagttttacttacttgctatcttgtttaaatcttaacactttattttctatgcttctgtgataattatcacagtttcaaaaataataaaaaaatattaatagagtttactaatctctgttaatatttttttattatctatattattcgatttcaaatctaatcacttagatacaatcattaaatacaataaaactattatctactcaattttttgaataataaagaatcttatttgcttttttatacaattcaatagggtaaaataaaaattaataaattagacaataaaaaagaatctataaatagattctcttaataatatttttatttaattaaaattctaataatacttttacttaatcataattaattatttttgaaataccttgataattcagtttctttaacataaaaacctttattatcaatcttaataagttcttctttttgcaatacctttatcattctggaaacagtctcccttttacagccaagcatatcagctaaatatgtaactgtaatatttacatttagtaaagtccattctccacagcaaactccaaattctctacttaacctatataattttgctgcaagttttttatctacttttatggatatagaatttttcaactgtctatataaacgtcttattcttctttccatataagaaataatatcctttgtaagttgaaaatcattttgcataatttctaaaaattcttcaatactataataagctacaattgaattttcaaatgcttcacagccaacagtggagtttttagaagagtcaaatgtaatatcatttatgacttccccactatttaatatgaaaattacttttctctctccattttcacttatcttaaaaatagatacctttccttctaaaagtatataaacactgtctaagctatctttttcataaaataaaatttcttttttttgtaatctttttagtttagctttttctttaagttgattcttcgttttagtacttaaattattaaaaattattactttatcaatattataatcttttaatttagacatgtaatatctctccattcctaaatttttaagagagctctataaaacattacaaatttcttattttattcatttttaaacaattttatagcatttgtagttttaattttcctttcaatagcttcattagaaagttcttttactacctgtgtatatactaaatcaataatgaaaaattgtgctaatttagaagatattgaaccagtttccagtactgtttctcctgatacataagataagtgtacatctgaaatatcctttaattcagaatttttattttcagtaattgatataattttagcattattggctcttgcaagctttacagtttttataatctcttctgtttcaccagaatgtgaaattgcaattattaaatctccttcttccattatggaagacatcattatcatcgtatgactgctatcaaaacttacacaattaaggcctattctcataaatttatagtttgaatcctgtgctattataccagaatatccaatgcctatgaagtaaactttctttgcatttattataagccttgcacagtcatgtacatccttactattgattatctctactgtgttctctaaagtggttacatttgaacttaaaagtttttttgctgtatccaaagctggctcatcattttgtatatttttatttataatattttttttattgatagttgatatttcttgtgctaaagtaactttaaaatcctgtaatccattaaaattcattttttttacaaacctagttatagttgcttcaccaatattgctctctttagctatttgtgatattggtttataaaatacatcatctatattttcttttatataagctattaataatttatctgattttgtgactttaaaagttggtgattccaattgttctaaaatactcattaaaaacccttctattctttatattttgtttaaaaaattatataatgctccaagcattcctgcatcattttgtctctttgcaaattctatattagtgtttttgtaaactctctctataagaacctcctttaatgctttgtctatttttggttttaggaacttttcttgtgccataatcccaccacctaaaattaccacttctggatttattacataacatatatttgcgattccaactgctaatgattttatcatattatcgagttcttttaaacaatcttcatcattattctttgctaaatcaaaaattatttttccatttaagtccttttcattcaaattttttatttttgctacttttttaattagactgctagtagatgccaattcttgaaaagaacttccatttatattcatatatcctacttcaccagcgctattactaaacccatttatcagtttattgtttattataatacatccaccaattccagtacctattgttaaacatatagaagatgttgcacctctacctgcgccaagccacacttcaccaagtccagcacaattaacatcattttcaacttcacattttatattaaactctttttctacttctttttttaattgcatacccttataatttggaattaattcttctaatgcaaatagtattttaccttcaactgggtcaaccatacctgcagttgatatacatataccacttatttcattttcctctatatatttttttactatatcttttattttggctaatattccttctccacctttttcctttgcttcagtatcaagacttgatttatcaattataaatccatcttctctaataaaaccatattttattgaagtacctccaacatctatacaaacgtaatttttcataacatatctccatacaaattatttttataaattaacaactctatttaaaattttatattacacaaatcttttacttatcttttccaattcacagatatatttccttgcttctgataagtctatagtatcacttaatacacttttttctttggttatatgatacttataaatatttttacataagtcctctcctaacatattaagaccttcttgagtgtaatgaacatcatcaatagttaatcctctgtcatgaaattgcatagcaattttacttcctacacacagtatatcacattcattacaagcagattcttgagctgctgcaattcgtcttgttctaataaaatattcatcttctccaagccaataaccagttaaacttacaaacattttatcaatcatacattcttctttaagcctatacgcaattttttttagactttctttatagtacaatgcatcactaccatattttgcatcactttcaccttgaatccaaataacgtatttattttctatattataatgtttacttaaggtagtacagcctgtattaaatttttctatagtgtcatttagaaaccagttattatcatgattccagttttttattcttgaaccatcttttgcattgtgaataaaacaaactttatttccagtaagcttattccattcatttgaaaatgcaggtgctatagtaccatcaccttctgaagtctctagctcacatctcatatttataatttcatcagtactcaaatattcaaaacaattttcatttggaatgatgctctcttttggatttcccaatcctctagcattgctttgtcctattaataagaatacatctatattttccataagttaactcctttacaaaattttaagcttttaattattttcaattttctcataaaaaactaaggctgaaaatagtaatctaactaaaatttacgaagtctcactaatcgctgaaagttaaatcactattttcagccctagtggttatataaattatcattatctaaccaaaaccttaaaaatagcttttttgatattttctttttctaaaacttttattcctgtcatatgagcatcttctggataacaaactaaaaaatcaccttttctaagttccatgtatccattatttttaccatcaagaggcaagaaatcgcccttttcttcatatattttttgttctaaattttctataaaatttatatctattcgttcacatccatcaagcatcaaatgaacatctatatacttcttatgagcttcccagaatctatcttctttttcacaagttttatactctacaatattcacaaaaatatcatcaccatctattgtataagtacctttttcataatctattaatgaattatctttagcatattcaaaacatctaagtaaatcttcatgcaatgttgaatatgtcttactatgatttatatttccaaatatcataagcactatctccctatataattataaagtctatttttatacttttatatacaaagtatattatacaatcttatagagtaactaaattatttatctaatcactctataagacaatttatcatttaaatattatttttcataataaacagtagtctcagcttttggtaaagatacttttgctttaactttagcttctattgcactaactattgtacctaccactacagaagtcgtgattgttattagagaatatgcccaagaagttacttctggcatacggtattttaaataaacaactaaaattgctgatactatgaatccaacatatgctcccattttagtcgcttttttacaaaatgcaccaagtacaaatattcctgctaaaacacctagtactagccccataaaactattaaaccattcatatgctgactttatttctccatttgctaatactattgcaacagctatagaaagtatacctacacctaatgatatatattgtgctatcttagtttgcttttccatacttatatcttttgttatgatagtttgtatatctaaagtccaacttgtagcaactgaattaagccctgtcgataaagttgattgagaagctgcatatatcgctgcaagtagtattcctgttatacccactggtaattcataagctatatatgatgcaaatacttggtcttgttgaactgtttgagctaaatctgggttttgagtatagtatataaataaacaagttccaattagataaaatactgttgcaagtcccattgataaaacaccatttccatatgtcattttattaagttgctttatatcagttgttgtagtaaatctttgaactatatcttgactcgatacatatgatgaaaaagtattaagaccagctccaataaatattataaatgcacttgtagatagtatatttttatcaaacataacttcattacttgctaagaacttgtgtccagttgtaagagtatccattactgttccaaaaccaccatttatacttgctattaaatagaacaatgtccctgtaacacctactattaataccataccttgtataaaatctgtccacaagacagcctttaatccacctgtatatgaataaattattgctattacacccataactactatcaatacatttacaggtattcctgtaagaccagctagaaccactgatggaagatacattatgatagacatacgtcctatttgatatattataaacatcaaagctccaagtactctaagacctttactttcgtatctcatttctaagtattcatatgctgtatctatttctaacctactatacagaggtaagaaaaattttattgtcaaaggtattgctataaacatacctaattgtgcaaaccacaaaatccaagtaccaccataagaatttcctgctaatgataaaaatgatattggacttaataatgtggcaaatattgatactgatgtaacccaccacggaatagttccatcacctttgaagaactcttttcccttcatttccttttttgaaaataacaatcctgcaaataaaactgccaataagtaaaccactagtattgcaaaatctatccaagtaaatcctaccatttgactaatcctcccatactaaaagtattttattaaaaatactttctgtatatttcttttgctcttgatttcatttcatcagttgcttctttcataggttgtctacagtatccagcctcaacaccttgttcttcaagtagtaatttaattgtttgatataagccatttcctaatatatctgttattaaatcattagtcacatgttgtacttcaagtgcttctgatattttttcattcttagttaattcgaatatttgtctagctctgacaccgtttacattgaatgtagaaccaattgccccatctacacctaaaactgtagctggtaacatcatttcatcaaatcctgcaaatattaatttatttgggaatgtttttctcattctctctaataagtagaaatctgctgctgtaaacttaacacctattattttttcattttcaaataattctccaaactggtctaaactcatatcaacaccagttaaaaatggtatagagtatattattaatctattatctacagaatttattattgtattataatagtgttttatttcttcaaaatcaaatttatagtaaaaaggtgtaacagcacttattgcatcatatcctaaatcagttgtaaatttagcaagttctacagcttcttttaaattaactgaaccaacttgagctattaattttatttcttctttcacttcatctttagctatttcaaatattcttttcttttcatcagttgaaagcatgaagttttcccctgtacttcctcctacataaagaccatctactttacaaacatctatattgtgtctaattatttgtcttaaccctttttcatttatattcccttccttatcaaatgaaactaataatgctgaataaattcccttcatatctgttgttctcatatctttacctccaattttaattttcaagtatagttaaatataataattttttaatttataaattaatttttaattaatttcaattgctttaacaaatttttctgttattaattgtggtcttgttattgctgaacctactactgatgaatgaacacccaactcaaagaccttttttaaatcttgaggagtatttacctttccttcagctattacaggtatttctaaatctttaactaatctttccattaatacaaaatctggaccttctaatgttttagtatatggagtatatccagatagtgtagttgaaacgcaatctacaccgtactcttgtgctttgatagcctcatcataatttgaaatgtctgccattactagaacaccgttttcttttatatactttataagttcttttaagtcttcattatttggtctaactctattggtagcatctaatgctatcatttcacaccctgttgttaaaagttcatcaacttcttttttagttggcgttatatatatatctgaatcttcatagtttctctttataatacctataacaggaagtccagtaactttttttatttcaataatatcttcaactccttgagctctaattccaacagctccaccttccatagcagccttagccattctccccattataaaaggactatgaagaggttcattttctaaagcttggcatgatactattaatcttccctttaccttatctagcattttttaaattacctcgtttctgaaatttattttcttgatttatgtattaataataacatgaaaactttttctttgcaatattttttcatatttttttctcgcatctatatttttactgatttattttatatattagcttgttttttacatttaaaagaaattttatttcatttttttggtgtttattttcattttatataactactgttataagtccatttaaataatttcaataaaaaaacccatgtatactatacataggtttcccaatattattctaaatccattataatttttcttccacagcatggacaaaattcagcctctgtatctatctcactttcacaataaccacaaattataaaatcatcacattcattttccaattcaaattttttaccacattcagcacaatatttatcatttacatttccaacataaccacactcacaagttacattactttctgccatttccatttcattaatttccatatttttttcataaattaacttatcaagttctagtaactcatcacagaatttatcaaaactattatcattaatagaatcttctctaattttttgatatgtcagtattcccatttccaagaatatctttgctttcttttcttgaatatcatcaatctctctatttaattttgatttttctttatataattcaactttaaattttccactaccaaactttttcttaaccttagaaaatttatcatctactttattattagtatttccttccacagaaattccctccaatcatatttaatcagctgaatttagcttatatcctattaaagatatcacaaaactatatacaaatgaaattacaatagcttgtaagactttaaattgcattattaaagttgttccataattagttgtattaaagaaattaatattactatctagtataaatgtactaaataaagccaatattcccatcaaaaatgcataatatatactaaatactattataggtcttatactatctgtattatacttaaatcttagcttgtatccatttaataataatattaacatagacaatgctcccattgcataaaacattaatttagtatctccaaataaagatgaagaacttaaagtaaacattgatactgttgagtttattatggttactgaaattccatttgcaaaagcccacatataactagctatttgtgggagtatagtaaataaatttaatccatttgaataactactcatatctagttcatttaagtaactactatcagatatagttagtaccaatagtattactaatactaaaacataacctaatatgaatgttcttatagaatttgaaaaaagagataaatacatattttccttttcataactttttttataagtagttatgtatgtacatataaaccctaatacaaatccatttaaaagaacactaaaaaattcataactatattctaatgcatatccatattctaacatactatgtgaactagtttttacattagtaaaaatagataaaatagctaaaactaatccataaaaaattccaactcctagagaatttgctaatacagtttttgaatctctacatctttttctcataaaaattaggtttgatattaataataccaaaatagggattataagtaatatcaacaaacctatattggcatttataaacccagaacccatcatggtagacatagatacactaatttgacccaagttgagagctaggattatatgtgctggatttattaaataactaatatcattaaattgaatagttataatagctttaaatatcaatgcaataataaacaatataaatatggttgtaaatgttgttaaaaatacacctcttttatttgcatgatatgaaagctcttttattttagatttcaagtctagttttgtttcaagtggtcttaatgatgctatttcataaagttcatttccacaaaatttacagtaattatccttagtattattttctttattgcaactagaacaaattttttcttctttacttttaagagtgatatggctattttttatttttctagttggttcacctgtctttttggaataattattatgtgaataattcatattatttattttcttttcacccattttttccctccaagttttactattgtaaattatcaaatataactatatcatataaaacttaattataccttaattggatatatttatctattttatttgtttattgctgttgttttttaacaggtcttgatatttaaatagtttgttaatgcgaactttattatttatattttattatgcttaatttaaatttattctattctttattttcagcagcaaactatctgtaaatcttaattatagtaaagtattaattaataaagttactcaacattagctaataaattttatctatcacaattttagattgttacacacaatatattttgatataattaaatcataaacgaagtattccaaatatctaatgatagaaaggaatacttatttttatgctttatttttaatggaggcttatatgaacttagaaaaaataaaaaaattttttggatttcctctagacaaaaaacacaaagaaaatgttgaaaaagaactctgcaattatctttatcatacgggtaaaatcatttgcataataatagtaatatctcaaataattatgatgatatcaatctcagctagagaaggaggcccttttgccacaccaagacgccaatggtatttttatatgtatgtaacactattttgtgtatcttctgtctttatgtttgtattttcttatctttggaataaaaaaaaggattgttgtacgttttatataaatttatggataatttatgtgacttttttctgcctatggggttgtgtaattactctacttgaccagttaggtggaaatgacctaagtgtatttagttatattatgttagcagctgcagctttctcagtattaaaatttggagaatcagtaatagtttttggaggatgctttttgtttcttaatttattcttacctgggattcaaactataccaggcaatgagtttagtaatattgtcaacacattttttataacatcccttgccatttttgtttctacaatgctatatagaaatcgtgtatttacttactatgataaacttttaattagtcaacaatatgaagaaatatctcatataaataatttacttaacgacaaagttatgacagacgaccttactaaaatgaacaaccgtagataccttgaagatattctacaaaaaaaattaatcagccatgcaaatcaagaacctataactggaatgatgatagatatagattatttcaaacaatttaatgataattatggacatcaaaagggagactattgtctacaaaatattgccaaagtaattttagattttacaagttctgaaaatgaacatgctatacgatatggtggtgaggaattttttatatgtatttttaactgtgatgagacagatgctaaacttaaatcagaatgtttacgaaaaattatagagtcctgcaattttgagcgtgatgatgttcctttaaaatgtgtaactgttagtattggagtttatacaaagaaaattgaaaaggcaataacattaaatgagtttataagtaattgtgataaggctctatatactgcaaaagaacagggacgtaattgtgttgcattttattaaaaagttacatactattatataaacctataagtattatatcgcaaaataaaagtaatcaaattatatatttatagtacaataaaaataacttgcatatctctaaaatagataaatatgcaagtcattttagtgtttatacttaaagttatataagttttattatatataattattaaaattcagcatttttaggagttcttgggaaaggtataacgtctcttatgttagacatacctgtcatatacataattattctttcaaatccaagaccaaatccagagtgagtagcagtaccaaactttctaagttctaaataccaccaataatcttcttctcttaatcccatttcattaattctatctaacaatacatcttctctttcttctctttgagaacctcctacgatttctccaactccaggaactaataaatccattgctctaacagttttaccgtcttcattcattctcatatagaaagcttttatatcttttggataatctgtaacaaacactggacaattatatatttgctccgttatatatctttcatgctcagtttgaaggtcacatccccactcaacaggatactcaaattcatgaccagattcaattaataattccactgctttagtatacgttattctaataaactcagagtttactatcttatttaatctttctaacaatcctttatctataaaactattaaaaaattccatttcttcaggagcattttctaatacatagcttataacatattttatcatatcttctgcaagttccatgttatcttcaaggtctgcaaaaactatttctggctctatcatccaaaattctgaagcatgtcttcctgtataagagttttcagctctaaatgtaggtccaaaagtataaacgtttctaaaagaaagtgccattatctcggcatttagttgaccactaactgttaaattagcctcttttccaaagaaatcttgagtatagtctattttaccatcttcagtttttggaatatcatttaaatccatagttgttattctaaacatttctcctgcaccttcacagtcactacccgttatgattggagaatgtgcatatacaaagtttctttcttggaagaatttgtgtattgcataggcagctattgatcttactctaaatacagctgaaaaagtattacttcttggtcttaaatgtgctatcgttcttaaatattcaagcgtatgtctcttcttttgtagtggatacgaactatctgattccccttctacaactatgctttttgcatgtatttcgactggttgtttagccccttctgtagatactaactctccctctacaagtatagatgagcttattgctaattttcctacctctttaaaattttctactttctcatcaaatactatctgcatatttttaaagaagcttccatcatttagctctataaatccaaaatttttagatactctagatgttcttatccatccagctacttttacagtcttccctatgtactgttctttttctctgtacaattcttttactgttataaattccttttgcattttaaatcctcctagtataattgttattaatttcttttaaatataatttcaataaaaaaagcccttcatccctatataaagggacgaaagactattactctcgcggtaccaccctagttgtcataatgacctcttagttaagcaatgcttaaagcctataacggtgccttccgtctaagtctacttactaaataagctttcgattagaaactccaagatgttcttcaatataaacctcgtattgagctttcaccatcctcaactcgctagaactacattttatatctactcttctcttcacagtatttatcttttattatttctactaattaacaaaattataccaatttataaatttttagtcaataaatttatataattgatactgattgttatttaaaatataataattctaccttgcataatgataataaatacttatcttcattacttctttattacttaaatttccaaaattttataatttacttccattgtcaacccagtcttttgcttcttcgacacccttaattgaaggtattgaaactttactatgaggttttaatttttcaacatcagcccatgctgctgtcgactcatttccaactaaaagtgaacttttaagtcttttattatctttaccttttaatgctcttgcctttttactttccaaaactatcacctctattatttattttgtaatagttttagcaattttacaaataaaattcataagtctaaattataatgatttttaaattaacatcatatcttttcaatacttaatttatacctatttatatacaaaatatttactttgtgtattcaaaatataaaactgtttttttaattttcatatttattttttatgccatttttctactctatctaaagtatttgatacaattaaattactaatcaattataattttacataggttcttatctatagagtatttgctatctgttgaatcgtattttttaaatttaaaatcccatatccctgcgatacatttggatatgtatatatctcaagttttgtagcacccaatattaaatatgtttttaaaacttgtgtaaacaatgataatctcggtacattatcctgtttttctaagtattccatcaataaggctaaaacacctgtgactatagaactgctcactcctgttcctgttcctgtattatatgttccatttttatatgtggatattatatctacacctgaagctactatatctggcttaattcctcttcctctaattggtcctttcgaagaaccaatccacatactatcagtcttattattaaatgtaccaactgtaattacatcatcactagcagcatacatagttatagtagctactgaatcagggtctaaaaaccttgtgtctggagctatcaaatttttatttggtaagtatatgtcatattctccacttattataagttctgaagtcaatcttaaaatccatactccaggttttatatctcttaatcttatctccaaattttcttttccagaggtaatatatggataaataaatctcattgcataagtagtattttctaagttaaattttcctctatatatataaaagtctggagaataccttatatcatgactaacttcacctgaaggagatattatctgtgctcccactttatctggaccattcgtatttagtgttatatcaagagcatagtcatctccatcttgtattattacatcttgaacttctcccacactgctaaatctgccagaataatgaatatctgtattcccttgatttcctgcaccactcactactaccacaccagcactactcaatatattaaaagtatctaatattgaagtagttgctacagcacttgacttaactccaatagtcaaatttattattagtggtttattttctgttcttgctatattagtaacatacgttatagctgctaaaaaatctgaaacactataatttatccttccagcataataagtatctgtatatgattttaatttaactactattaagtctgattctgtagtaatacctctatactgcgaatttatccttccatttccagctaatataccagaaactaaagttccagtacctatattatcttgactcaaacttccatcatttctatttatggctatatttaactgacttcttgtaaattcacttccaaaaataaaaccttctggaggtggatttgtatttgcttcttggtcccataaatatagaactttactagttccatcatcatttataaaatcaggatgcaaataatctataccagaatctataactgctaataaaattcctcttcctgttatatcattatatggattttcataaatataatcagtttcagctgctgttgtaatggtttctccattatttacattattagttatttcaattagactgctcattggttcagattcttcccaccaagcaacttgtattatattatttaaaatagtttcatcaaaatctacaggtacatatattactgcaagctgactatttaaaaccatatacctatttattccattttcttgtagggcagattctatatcaccttgataaattatacaataagatttttccataaatccctcctatcttaaaacatcaaacattcctctaacatccaaaagcccatatccagaatttgtatttggatatactgtgtttgaatcttttctagcaccagcttgcataaaagtttttattttttgcacatatgcttggtttggatatctaccatcaacaaaagtatattggaaatacattgcagcagcaccagctgcatgtgcacttgctgctgctgtaccagttatagttgcatacgtgttcccaggataagcagctattatattgacacctggtgctactatatctggttttaacctgtcttcaatagttggtcctcttgatgaactttgccataaactaccattaatagtattgtaggctcctacagttattaaatcatcttgaatagcaggataatttatagtgtaaaaagggtctacctctctaaatctagttccactttttaaaagttctctatttggaaggtataagttatatcttcctgttataatataaacccctactaatcgaatcttccatacacctctttttgcattctttaaagtaacattagtaaattgctgcccagaaaaagttgttgggtatatatacgttatagaatattcagtcccctctaaatcaaataaacctgttactttattataatttgaaattccaacacttttactttcttcaccagtgggagatactattattacatcagctttatctggtctatttaaccaaagttctaatgataattcttcctcgtcttcatttaactctaattcaacttcaacagaacctccaacatgtggtattattccagatgtatgtgtctgtgtattgccctcatttcctgctcctgctgttatacataaccctctagtaaagaatgctttttcactattgctcctattggttaaacctgccaagctactggtacctaaagacatatttataactagtggtcttctaagttcaaaagcttttttatatgcatactgagatgcagcaaacaacattgcactattataaaaaccatctatcttaccgagttttattattattagctcagaatcttctgctatacctgcatattcactatttacatttccaagccctgagcatataccactcaacatagttccttgaccaacttcatcctgagatagactagggtcattttctgcgatagctcgatttatatcttctcgtgtatattctgtcccaatataaaaaccatcaggtggagttccttcttttgtttggtcccataaatatactatttttgaagtaccatctggataaataaaatctggatgtagatagtctattcctgtatctgcaattgatattagagtccctcttcctgttatattaatattaggattatttttaaagaaatttacgcccatttcttctgttgcaactacacctccaaaagtacctcgattaatttctccaagtaatgtcatctttgtagtcgatacagttcttatgattgaaggaagttgcaaaactcgttgtatactactatagtctgtattatttatagatagtacacctaatgaatcacttatcttaaaaaaattttgactcatacctaacccagctagttcttcttcaaattcgggagtatggactacatctattcctgatagtattcctgattgtctacttgcatttttacttatataaatttcattctctaagtcattatgtatttgtatattataaccatctataaacttatacctattttcctcatctttaaatgacttattaatacttctatatccaatatcctccgtttctaaatcttgatttatactagatagagtgtacaaatctatatctgataaatttaaaaaaccaaatcctgatgaattatttggataagattgattacttaatctccttgctccctttaaaagtaatgcccttaatttctgtgaatacaaaaataaatcatttccatttacaattccccattccataaacaatgaacaaacccctgtaacatgaggtgtagccatgctagttccagttaatgctccacttgtacctcctggtaaaaaagatattatatcttcacctggagctaataaatcaggtttaaaaacacctaattgtgtatctccttcaccagaaaatatagatactatgtctgttcttgaattaaaactacctactgttacaactctacttgctgttccaggaactgttacagtaagctcttgagtaggaatcagaaatctagtatttctatttagtccttcagaagttggcaaatatatatttacattaccagttactatatctattggttcaaatacaattttccataacccaggagttatctgtgtatttgaacttaattgtagagtaactcttcttgtaagagagtacggtgctatagggtaaaaataaccagttattctagtttcacccaaagtatttcttatctcacctgaagttagagagattgcttgtgtttgattgtttgatgggtttaccaaatgtacactaaaatcatcaacaaaatctggccatatatttatgtttaatatacgctctccttccccaactataaactcaacttcttctgtaatattattttgaagcctaatccttttatgacctcctttatctgcattatttccagctgctacaactatattgtttttccaaaataaacacatatcatctatatattgttcaaataaagatgttcctctatgtgaaccttcattacttccataacttatatttaatgtaacaggcattcttaattctaatgccctatctaaaataaatttaattgccctcataaactctgtacttctcgaaaaaatatcggtctgtatatttccaactctaaccactattattctggcatcacttgcaatagttgcacaaatacctgcaacatgtgtcccatgtaaactagttgttgaaataggtatatacatacttccatctattgcattatttatatcttcattagtatataatgttccttctctaaaaccttctggtggatttccttgaatagattggtcccaataatataatatcttagacctcccatcactatctctaaacacaggtagagtataatctattcccgaatcaattataccaattatagttccctttccagttaaaccagttctatttttaaaccccgttattcctgtacttgaaaaactttgcacatcctgagtctgtaatataaaaggcttttctataaattcaatttctggataagttaaaagtgtatttacatcttcttcattacttgatgttattattgcatatgatgaattaagtatctctactgatacacctaattcttcttctaatctcaatatatctccattgtattttacaattaattcataatttattataatcacctcgacttctaaaattattattaatgtatatgttttgtgtaagtctaaaatgtattagactatataattttttaagtttcagttatacaatttataatagatatattaaaaaataaataatgatggtacaattttgaataaatcataccatcatttatatttactttatcttgaaagcattaaatttttcaatgctttttcaagaccttttacagtcagtggaaacatattaaattcactttgtatcattctttgagtttggtaccaataattaattgaatcccatccatctctaagttctggattcatccatacaattttactgtactttctcttaaaccttttaagccattctataccaggtgtgtaattatatggaccacgatagttaccaccaatatgaagtaactcagaaggcgacatagaagcatctccaacaattataactttatagtttttatctatattttttaatatccattcagtattaatagatttacttaaccaacattcaggtgttgtaaataatctatcataaatacagttatggaaataatatatctttacatctttaaaatgatttgatttacttacagactgaaataatgtattacataaagtgctataccccctcattgaaccacctgaatccataagcaataaaagcttcactgtattttttcttggcttctcaaaaaataactttaaatatcctgcattattacaagtctcttcaatagtcttatccaaatcaagctctgtctttggagcatctattctagtagaaaattgacgaagtctctttagtgcaacttgaaattgacgcatatttaaaacttcatcatctctaaaatctctgtattttctttctcctgcaacttcaagaacagctctaccataagtagaatttccacctatacgtataccagtttgcccttttcctgaatgtcctaactcggaagtgcctcctgtgcctatccaataattaccaccattatgaggagagtcttgttcttttattcgttcctccaatttagctcttaatttatcaagatttatatttggattttgttccaatctttcaaactcttctaaatctatatctggttttttaagccaattcataatctcttctggaatttcttcttggtgttctatacctttaaaatactccaaaaacactgcatcaaacttatcaaaatcactttcactttttattaaaatcatcctgcaaagatagtaaaaatttgaaaagtttgaatagcacagccctttatccaatgcttcaattaaagtcatccattcatttaaagatatatttaatcctcttgacctcaataaataaaaaaattcaataaacataattatccagctcctattaactataagtgtctttgcatagattcaatatcctcattattcttaagtagtattcctgcaaaaggaacttctttttctattttttcaataggcattccactcaaagttaatgcttgtatccagtctattaactctgatgtactaggctttttttgtatgtcctttaaacttctaatccaataaaaagtagtcattacttgttccaataggtgttcttctactttatcaaaatgtactttaactatttcttccatcatgtctctatcaggaaattctatataatgaaatatacatcttcttaaaaaagcatctggaagttctttttccgcatttgaagttataataactattggtctttgtttagctcttacagtttcttttgtctcatttatgtaaaactccattttatccaattcccaaagcaagtcatttggaaattctaaatccgccttatctatttcatctattaaaagaattacttgttgatttgagctaaaggcctctcctagtttaccatattttatgtacttgctaatatcatctacaccttctcctccaaattggctatcataaagtctttgaacagtatcatatacataaagcccttcttgtgcttttgtagttgattttatattccaaattactaaatctttttttaattcatttgaaattgcttgtgctagcatagttttacctgttccaggttcgcccttaatcaaaagtggcttttcaagagcaatagcaacattaactgatgccatcaattctggtgatactacataatcactacttcctctaaagttagatatctctttttttatcataaatcctactccttttaaacagtattttctaaatgtatatagactttattactatttttgatataaaaataataatacaatacatttgtatagtattattctaaaattctatatctaaataaaatcacctctaaaatatttaatttttatctttatttgtcataattaaatgaaatatatattttaaagaataataaaagatagcttattgtacaaaatttaaattataaaaacttagtttaatcaaaggcaccactttttttcattttagattatatataaacataatataaataatttttattattttagctataagcataaagttttaacgtatttataatttcatattaatcatactatattaatactgctttttattgtataataagctataaatattaactttaacttagatttaagtatatctaaatttaataaatataagaaaggttgtgttattttgcaagataaaaaaatttatctaaatattgtactcactgtagttgtttcatatatcttgattaaagttattgataattacaaatatttttttggagtgataagtttattaatgtcactactaacaccatttataatagcatttgtattagcatatatattcaacccactagtaaagttcttagaaagtaaattaaattttaagagaatatattcgttacttcttacttatggtgtactcatagttatactaatttcctttatattatttacagttccatccatagtaaatagtttagctgatttagttgctcaaattcctacatacatagataaaacagagcagttcttattcgacttaggtaagagtttacaatcagttgaccctaatacattaaaagagtatggtgacaaaattatgagtgtaatgcctaaatttagtaacttgcttattggttcacttggtgggatatttagcactacattttcagttggaaaatttatagtacaatttcttttaggttttataatttgtttctatatattattagaaaaagaaaaattcttactgtttacaaaaaaagtagtttatatttccctaggtaaaaaatatggagactttataatagaactatgtcaaagcttaaatttaaatattggtaaatactttacaggtaagattttagattcttttatagttggagtactttctggaattggtctttactttttaaaatctgaatatgcactattatttggtacacttatgggtgtcatgaatatggttccatattttggtccagtaataggtatggcaccagttgtaataattaatttattctccaatccaacaattgctttaacttctttaatttacttaataataattcaacaagttgaagttacatttatagagccaaaaatcgtaggtggacaactaggtcttagcccattctttacaatcctagcagttactgttggtggaggattctttggtatacctggtatgattctatctgctcctgtgatgggcgttataaagatatacttctgtgagtttgtaaatcgtagacatgataaaatacaaatggaataaaaatacaatttaattacgattttgtaatcaaaagttacagctgtgtaactgtaatattattctctttaatggtaatatttaattataggaaacatacaatattattaagtaatgaatcttatataattaaacatgaaagagggttttagtatgaaaaaagcacttatatctttattagttttatcttgtttgttattaactgcaccagtaaatgaatcttcttatgcagattctcaaaagaatgttcctgtaagccaaaatactaaattgactcaagaacaagctaaagaacttttagtaaaatacaacaatgaagttgattacatatatcaaggaaatgctagtgattttgaagcattaaaagctaaaaatcttaatggttatgtatttttaccagatgcagatggtgatattggttactttgtaaatgaaaatacttctgagatatattacttccacccaagtggatatcttgaattagttaatcaacaacaaaataataaataactaataaaaaatggatgcaaattgatataaatttgacatccattttctttttattttaaagttgtttctttttataaactttaaatacttttttaatcctgtgcttgctcttttataagtttctttatatctacagcaggttcatcttccatttttataacttttccttcccatgttctaagcataacgtaatctgttccttttgatacaaggtattgcggaagcaaaggagtctttcctcctccttttggcgcatttactatatatgttggtatagccattcctgatgtatatcctcttaaatactccatgatttcaagaccatcatctactgatgtattgaaatgttttgttccctttacatgtttactttggaatatataataaggttttactcttatttttagtaattcttgatttaaacatctcattacaaatttatcattatttattccatttaataatactgcctgatttcctaatggaactcctgcatttgctaacttttcacaagcttctttagattccttagttatttccattggatgattaaaatgagtatttatatatacagggtgatatttttttagcatattgcaaaattcatctgtaattctttgtggcattgtaacaagagtcctagtacctaatctaacataatcaacatgtggtatctctttaagttggctaagaatccactctaaataatcatcttttaatgtaagagcatctccaccagttactagtacatctcttatttcttcattttctctgatatagtctatagattcttggataatagcttttgacttatgagaatcttgttgtccaatatttcttcttctctgacagtgtctacaatacatagcacactcatttgttacatttattattaatctatctgggtatcttctagttatacatcctgctgggtttgtatactcttctcccattgggtccaaatcttcttgctcatcttccaactctatatgtgttggtatagacagtaattttattgggtcacatatatcttctgggtctataagactcaaataatatggagatattgcccatctaaattgagtaccaacctcttttatatattctttttcttttttagttagagttataatttttgataaagtatctacatctgttattctatttgataattgccatttgtagttattccaatcctcttcagttccatttaagatacttaatattttctgttttcgtttatttatctcttcttctttttcaagacctctgttaatcgtttttctagcctgaatataatcatcaatttttgattttaattcagcagctctctctaaggatattctagtttgttcattcataattttttgctatcaaagttaactacttgtattatttgatagcgtcctcctttctgatgtgtttatatcattctgataggcagatttaattttgccatatagattttataacaaatgaaattgaattaatttttgcattttttctgttatttcgcacatttatgaatatttttcaaccttcgtcaataaattacaataaattatgcattttttttaacaaatgattaattttttctatttttaagaattattttaccataaaacgattatattttcaagattattaaaattaaattttttaataaaaagtaaagtatttcattaaataataaaagcggaggtttattataataaatttctccgcctttttatttatttaattaaataatagtaaaataaatttaactcttaagaagtgactttattatattaagccctttttctaattcttctacatcttttggagctgttacacaaatacgaactgcttttggaactgtagagtttcctactgaaaatcgttcagcacaatatacttgaactcctagattttttgcagaaatttcaaatgattttccatccaattcatcaggaagaagtaaccaacgaaaactgcaattcttatcaccaatcaaattataatctgacaaaactttatcagcaacttcatttctttctataattgcatctcttttctcttctataattttatctataataggagaatataataaacgatgtactatttctgctgtaaatggagaaaccattagattcatattatatagtgcattttctaaattttctatatatcgttttggagcaactacaaatgctactctaagaccagcacataaaaatttagatgtactaaaaatatatatagtattatcactagctaaagaaaatatgggagtttgtataccgtctctaaaaatgctatttatagcatcttcaataattattatattatattgctttgctatcttggctatctttttacgagataaatcagacatagtatgtgtcgttggattatgataatctggtataagatatatgccttttatattttcatttttacaataactttcaagatattcaatcgatatttcattattttcttgaggaattgggactaattgaatacctatcattttagctattgacttaattccagaaaaacttaaagaatctgtagcaattctatcaccagctttaaataatcctagtaaagttgcacatatagcattttgccctcctgtagataataatatattttcttcactggtgtatacattatttctttctatccattttgcaattgactttttttgcatatatgtgccagatggagacatgtattgtaaaaacctatccatttctggttgttttagtacatttttaataaagtcaataatatatgtattttgctcatatggaggatgaactgtccctaattcaattatgtcttttgattccgtttgatataataatgtattacttacatttacatcagaagaaatgaatgttccctttcccacttttgcacatattagtcccttttcttcgcaaagtttaaatgctcgtgttattgtacttaagtttaaatctagaaaatctgctaattcccgttgtggaggcagtttatctccaggatttaaatttcctcttttaatatcttcttctaataacattgctaaagttttatatattggtggttttcggttatctaattttggtttccatgtcataggatagttttcaaaagaatttattggcatataattactcctcttaattataattgtactccatacaattttattattgtatgcttctattttagatgctatacttgtatttgtaaatagctatttcaaaataaataaataagagaggtataatatgaagactataggcttaattggtggtatgagttgggaaagtaccattacatattatcaagttattaatacagtaataaaagaaagattaggtggactacactcttctaaatgtatactttacagtgtagattttcaagaaattgaagaatgccaatctagtggaaattgggaaaaaagcgccaaaattttagctgatgctgcaattaaattacaagaggcaggggcagattttattgttatctgtactaatactatgcataaggtatcagataaaatacaagaaagtatacatattccattacttcacatagcagatgtaactgctacagtattaagggaaaaagaaataaaaaaagtggccttattaggtactaaatatacaatggaacaagatttttataaaaatgtaattattaataatggaattgaagtcttaattccaaatgaagaagaccgtataatagtaaatgacacaatatttaacgaactttgcttaggaattatatctgaatcttcaaaaaaagctttcttatctattatagataagcttggcaaacaaggtgcagagggtgttatattaggatgtacagaaataggtcttttaattaaacaaaatgacacttctattccactatttgatacgacagtaatacatgcaatagaagccgcactaagttcaatttaagacaatattgattaataaaaaaaatatctatagatttgtgtaaataagactttttataatttatattactagagattttaaacctatatattgtaacaaaaaaaggatagtataattaccctatactatcctttttcttaatttaatatttaaataaactcaacactttcaatttgtatacaaatctatcttacatttataacatcactattttgagagctatttccattataatttgcaacaacataaatatctagatttaaatctccttcaggaatacttatagtatgctcatttccctgtatatcactttgatatagattaaattctccatctccattagtattattttttacatatatactgtaagtacagtccttatgagatatactactccagttaactctaatgacattattatctctatcaacattagctgatatattttctaccctcatatctttaatattattatcattatttgaatttccatttccattagtaatatttattacattacttggcttagttgtatctgaatcctttttccctatgacataaatatcaaaatctatattttgattacccttcatatctacttctatagttgcatataccttgttagacttacctaaatcactttcatttatagttatagatttaattttcttaaatgattctcctgacaacttatctttaagatatatatcataatcaaagacatctttcatataatcccattcaagtttaataataactttattgtttactattttatgtgaaccaaccaagttttgtatatagtcattcgttatagtttctttgactactgttactgttattactttagatttatctccacaagttattctcaccctatctttaccttctctaagacctacaacatttccattactacttaaacttattgctctttctacaggtaattttgaatctactaactcataatatatttttggtggttctaaaccaggtggagaagttattatatctggtttcaatttttcattttggtcaacttctatttttatatcatccatatttatttcagcaactctagcttgaatcctaaatgttctctcaatttctttatttccacacttagcatatattgtagctttaccaactccaactgcacttactttatttcctttgatttttaaaatattttcattgctactcttataaactggcttatatgattttttaaacttatcataatcaacttctattgtactttctatagtagcactatcaccaacatgttttaaatccccattaatctccatatctagtgattctacctctgggtctactacttttatagtagccttttttaatactcttgaatttttcatgatacccacagaagaatacccaacctttaatgctgtcattttatttccatctatttttaaagtccctgagttatccaatacattaaaccaaatatttggatttttagcatacgaaggaaccttaatatattcacctgtagacaaagtaactgtttcatttaattttactacatatttatctatatctttaacatattccccatctacaatttcaatttctactccctttaccattggtctaagtattccaaatttaaaaaggtagtactgcgcaacaagcaatataggaatagatataattatggcaatttttctgtatttcttattttttacaaatatcatctatccacttccttttagcctaatatataatcatttgttttgtaagcaatctacctaagttaaatattgggataaactggaaaattattatatttcagaatatccctatactaattataaaccataaatttaaaatttaaaactaaaattaatgttaatttcttactattacaatagtctaattttagtgaaataacatttgtcttgtcagctgaaaagttatataattaattaaaaagaaattatacttatattatatgaggaggattttaaattggaaatcaattataaaaaaagaaatttcaaatcatttgctaaaagaaaaaatattgaaatttctgttcaaaggtatcttattgacgcactaagttatatggcacttggtcttttttcgtcccttttaattggaacaattttcaatacattaggagataatttcaatatttctctttttactgaagttataagccctcttgctaaacaggttactggtccagctatagcagtggctattgcgtatggacttcaagcacctccacttgtactattttcttgtgcacttgttggagcttgtggtaatgaattaggaggacctgttggagcatttgtcgctacactttttgctgtagaggttggaaaattagtttcaaaagaaacaaaaatagatatattggttacacctgctgtgacaatactaattggagtacttgtagctgaacttattggtccagctgtttctgcttttatgacttcatttggaaatataataatgcaagctacaactatgcaacctataataatgggagctttagtctctgcacttgttggaatagctcttacattacctataagtagtgcagctatttgtatgatgttaagtttaggtggtcttgctggtggtgcagcaactgtaggttgttgttgccaaatggtaggctttgctgttatgagctttagagaaaatagagttggtggccttgtggcacaaggtcttgggacatctatgttgcaagtacctaatataataaaaaattggaaaatttggataccacctactgtagcttcaatattacttggaccattatctacaacaatattcaaaatggagaatattcctattggttctggtatgggtacttgtggattggttggacaatttggaacagtaactgctatgcaaagtgctggaaaaggaggtatatctatgtgggttggtatacttttacttaattttatacttcctgctattgtaactttgttgatttcagaatttatgagaaaaaaaggtctaataaaacctgaagatttaaaactagatgtataaattaaaaactactccttttacttatataaaagtaaggagtagttttttttatgaaaattccaacattttttttaatagccaatccatagaacctttaacttcattccaaaccactatgttttcatcatagtaatagacagcttctgccttttcttcctctgtaacaaattctctaccaaaagcatttcgccaatctaacaaatataatccaacgtacttatttttacttctagcaaccttaatagaatcatttgccaaaaacatacttttatttttaaagtaataaagagctttactgtacatccatgtagcagatttttcttctttataaagttcaaataatttatttattgaagttctatcatttaatctaattaatacatttaataatttgtatcttattccctgctcatcactaggattaatttctattaaatattctaatacttttttggactcctttagattattaatactttctaactttctagcaagggattcaagtgctatcatataggctctggtagataaacctttccaaaatccaagttctttatcttctttagtaatcatacttttacctatatttacagcttcctccatatatctaattgattcaatatcactattcgcatcttgtgatagcttaatatatcttttatatagtatttttttcttttctaaatctaaatctacagactttgatttggaattggtctcttttacccaaaattctacattagaaatagctatagtatcttgatttaaaaagtcaatactacaaacatcttttattaaagacgatttattatttatagtatttaaagaaacacctatttgttttgaaaactctttttttgttatatgtagtggatgcttcttattgtataaaagattttgttctaaaactatatttagtatagctgaagaccatatatcagctctagaagaatgaattatctctttattattatctaaaaggttttgcaaaattttaaagcttatatctttgtattcttgatttaaattggagttgcaaaatctatttatcttgtccttaatttcttctatcttgcctgtcatgactcctcctccatattttacatatataaaactagtgctacaaactcaagatcttcttctcctatattttctatagaatgtttttcgccatcagctgtatacactacatcaccctcatttacttctacaaattccccattatcaaatactttaccttttccctttagtatataatatacttcaaaatctgttgtatggtcatgcacaccaattgaacttcctactggtaaagctactcttttaaatagtcttccttttcctttaagctcttcattttgtattatgttttcaagcttaacctttcctataccaccatttaaattttcttttacttctacttgtaattcagatttctttcttatcatagctcatcccacctgccaaacaatcaatctaactactaaattggcatatcctttccataaatatgtttgtattttaatataataataacatatattatcataaaaaaatattactgaatacacaaaaatgatactatttttacatatatttcgacttaattaaattatcttacaagttgacgtctatatgaaaaaaacatatactcatatagtatggtaaaattttgttaaactatttatctggaggttctcgacatatgtcagttttaaaaacgcaagaaaaacttaaacaacctagagatttatatttctgctgttcaatatttacctttgtaggacttgcatactatggtatgaaattggtattattattgtttttagctgaacaagtctccaaaggtggtttagggttaacaccagcagaatccgcatcaatgcttgcatcttttttagcatggacttatttctctccagttattggtggatgggtcagtgatagatttttaggtcccaaaaactgtattatacttggaatgctaatggtttcaattggttattttctaggatacatagcaaatagtaagatggatataaacatcatgatatttttatctggattaggaataggtttttataaaggaaacttacatactatggttggaaacttatataccaatgatgacccaagaaaagatggagctttctctattacgtatatggctactaatctaggtactttatttggccctttaatatgcggtttagttgctaatgaatggtttgctatgaaaagcggattatctataagtatgtatggatatagatatgtatttttattttcatcaattacggttctaataggtttattcttctttatatttggaaacagaaagttttataaacctttgaataatgaccctagtaacgggagagagtctataagaaaatcactagaatataagaaaatgctcgcttcaagacctttaactttgattgagaaaaaaagaataatagtaatattggtgttagcttttttcacagtatttttttggatagcatataaccaagcctctatgtctattgcactctatacaaaggaacacataaatcttactgttggcaattttcaaattcctacttcatggatagattcatacaatggtctcctttgtgttattcttggacctatctctgctttagtatgggtaaaattatctcaaactaaaaaaggcgatttaagtgtgccaaaaaaaatgagcttaggttttatactattagctatagcatttttgtttatgatagtagcagttatacaaacaggaacagaccctaattcaattcacaaagcaagtgtattttgggtagttggatttttaacattccaaagtataggagaaatttgcttttctccagtcgggtatggtatggtaaataaactttcgcctgaaaagtatatttcattcctaatgggtgtttggtttttaggcaaatttgcagcaaataaattatctggctatacgcaagctattatagaccaacttggtatgttacaagtcttcatagtgataccatcatttttattgatatttggaattatactacttataatgaataaaaaattagtagaattatcaaattaaaaattttttaaagttaataaaatatacaataaaaaatcgaggcattataatacctcgatttttattgtatctagtacaaactatatagctctagtgtaaacttttaaccattctctttcttcatcagttaagaaaggtgatattttatcataaactaacttatgataccagtttaaataatctttttcatccttattcattaattctggtactataccatctaagtcaataggagctaacgtaacaacttcaaattccataaattgaccatagaaattcttttcagcttttctaactacaatttcattctctgttcttataccatgagaaccttctatatatatacctggttcattagtagttaccattccttcttcaagaactgcactatcaaatctttcaggtactactctccatctaaatccatttggagcttcgtgaacatttagcacaaatcctataccatgtccagttccacattgataatcaattcccatattccacatgcaacttctagatagtatgtctaagttatatcctctacaaccatgcaagaacttagccttagaaagatttatcattcctcttgctacagaagtaaagtgtagttttaattcatcacttataggtcctaaaactgtagtcctagttatatcagtagttccatcataatattgtccacctgaatctactaaaaataatccttctgcctctaatttataatttgactctggagttgcactatagtgcatcattgcagcatgctctttatatgcagcaattgtattgaaacttggctcaaagaaaccttcttgctctcttcttaagtcctctaatttttgagtagcacttatttcagtgatttccatcttacctacatttttctttaaccagtacataaatttagtgaaagccacaccatcttttacatgtgaatttcttatattttctaattctacctcatttttttgagctttaaaaaacattactggattgaactcatcaactttctcaacttcacaaggtatattattgtaaattgtataactaagcttagttccatctaataaaactttttcagttttgtctatattttttacaaattcatacacatcattatatggctttatttgaacattttccttagctagttcatctaatatttcttcatttaacttactttcatcaacaaataaataaacttcttttaaagttattactgcataagaaagtacaactggattatatttaacatctccacctcttatattgaataaccatgctatatcatcaagagtagttattacatgagtagaagtacctttttcactcattttttctcttaatctagctaattttgagctaaaactttctccacaatatttaacatctaataaaaatgctttactatctgataaagcaggtctatctggccatataccatctattaaatcatactgatattctatctttataccttttttagataatttttcagctaatgtagctccttctctagcagatataactctaccatcaaatcctaaagttcctccttcaggaatatttttatataaatattcatctgtagttgggcaaccttcttgtcccattttgaataattttattgtacttccttctaattgagattctgcctgtataaaatatcttccatcggtccataacccagcttcgtctttagtcacaataaccgtccctgctgaaccattaaaccctgatataaattctcttgatttgaagtaatctcctacatattcactttggtgattatcagaagatggaatcatataggcatctatatttttttcttccataaattttcttaatccacttaatctatcttttatattcacaacaagacctcctcgaaataatagtttgaataactaaatatataagtatgtaaagtttattacataaatattttttgtataatttatataaatcttatacactctaattatcacaattataattttaattataatatctatttgtgtaaagctttttttcataatcaaagaggaaattacatttaattttatatttaaatgtaacttcctttatttgaagtaattcatctatttacaataattcgtcatgaattatttttcttttgttagtaaatccatagccattaatcttgttaatacatttcttattcccaataatattaaaccaaatattattaaaactgttgctattcctccaaatatctgtaaaaaaccaagtgtggctgtaaaaccagcaatctttcctgataataaacttgcaaaaaaacttgttagataccaggctcccatagataatgtagcatacttagctggagctaatttattgaacattgcaagtcctataggagataagaataattcacctactgttgtaaatatataagtcaatactataaacaatatactagcctttaccattccatctggaccattagctaatgtagcaaataccataactataaacccaacacccattattatcattcctaatcccattttaactggaatagagaaatcacctcttttggtatgagataatttaacccatagggtagctaatactgggcataaagccacacataatatagcatttagtgatgtaagccatgctactggcatttcaaatccaaatagagttctatttacattatcccttacataaatcataaaagaactttgtgtttgatagtatgctgtccagaataagaccacaaataaaaataaaataaccattgctattatcctatttttctccaacttagtaagtggtccatactcaattttttcacctttattacctttagtcacaggatattttccgacttcatttaataattttggtgcaagaagtgtaaatataatcatacctaacatcatgcctataccacaaattaaaaatgccatcttatatccataagatactatatctccacttgctcctcttactgcaaatacattatcagaaagcaatccacatattattggagctataaatgctcctacatttactgccatatagaataaactgtatgctgcatcttttcttgacacatcagttttaggatatatatccccaactatatttgaacaacttgatttaaaaaaaccatttcctaaaataattattgatagacctacccaaaccatggcaatagatgtagatgaagcaaatagtacgaaatctcctattgctattaaaagtgcacctatagaaatacatttttgttgacctaaaactttatctgctaaccagccaccgactaatggtgtaagatatataagacctgtaaataagccaaacatggatgttgcttcttgagtagaaagacctaaaccaccttgagctacacttgctgtaaaaaataataccaataaagctgttaaaccataataactaaatctttcccacaaaattgtcatgcaaataagccaaaaactcttcggatgaccactttttttagatacgctttctgtacttgacataaaaaaacgcccccttttgttttatagttgaatttaatattaatattgctttaaccattttagcacatacttataatatcatcttttctatgtttactcaatagattatcgcctgtattttcatttttttattattatttttaaaattatgaaaaatattatttttttagtatcttcagtagaaaatcttaatatatatatatttaaataacaacttaaatattcaattcttttttgtttattttttcatttttgtaaattttcattaaaaaaattcaaattaaaaatatttctttttaatatttttttgcatgttatttatttatcacttcatatatataaatagattttattacaaaataataaaagctactttagactctctatattgagagtaaaaatagcttttatccatacagttaatttttcttttttttaataaattgactttatctattctttagctttcatttgatatttatctgtaattttaacattatatttttcttttaaattttgtataagtaggttttgtttttctgatgttaaactgcttactaaatctgattttacctcttcaaatggttgatatttttcatcagttttcttaattatatgatatccataatcactttctacaagtttgttagatacctctcccttcttcaatgcaaaggctgctttttcaaaagattccaccatctgacctttaccaaagaaacctaaatctccacctgattctgcactactatcttcagaatattttttagctagagtagcaaaatcttccccagcttgggcttttttaagtatttcttcagcttctttcttaagttcagcttttttgctactactaacttgcttacctttatcatcaacagtttttattaaaatatgtgaagctctaacttgtaaataattgctcttgtttttattgtaatagttctctgcttctttatcagtaacttttgatttttcatttaaatattttgatgctactagctcttttttcatatcatcttttatatatttttcagtcaaatcaaactgttttaaaaactcttctttagtcattcccattgctgattctatactactcattaaattattatactgagcatctagttggtcattagttatacttattttctcttttgctgcttcagaggataatatatcagatgtaatcatagtttcaatcatatttgattcatatgaacgtatttcgtcatcagtcatagtagtttttgcatttaaataaaataatggctccattctctttcttaacatttcacctgttatttttttatccccaatagtagctactacctcactgctattatagtgttttgaagtagcaggcaattttcttccagcttctttaccaaaaacatagcctccacctaaacatatagctcctactgcaacaattgctacaatagctttaagtgttttgttgtttagctttatttccctttttttaactttgttatcagtatttttttcatctgacacatcatcttttttagaatttacattatctgaatttttaggttcatctaatgtattttcttttggatttttttcttcagacattaataccctccttaattttaattgtgcaatacttcacctttattattttacattaaaataatattaaatgtgtgaatcagaaatgaaactcttatgaatttaaaatgaaattaaatacttctcaaactataccttataaagtttcttcctacttttgtatctccatattttaacatttgtataacttcattcttttccttttgcaaataaatggcacattcttctaaagacttaaatatttctaaaatgtcaccttttttatttactaattcaacttttttctttccaccccttttgattatagacttatattttttaaaatattcatcatattcttcatcaatacattcaaatctataattcatttttaatgcttcaattttatcatttgtcaaaatttcatttcttttttcattagaaagccttatactaaatattttattgtttagaatattaaatatctcagatggagatttgctattatcgagatagctccattcacctttgcagtattcatctatatttaatacttcacttaaataatttattgcatctccaaagtaatccatatatccatattttaaattttctcttatgtatcctaatggaactttgagttttttactacactgtatatgagtgtcaaaaacccactcttctttagtatacaagtttatagcttttatactttttcctctttttattttaatttcttttatgtactctaaatcttcttctgtcaaacattcacttacttttttttcttcaataacatttttttctagattataattttcattttggtcaagtccttcaaacttatttaaacctattttttcactttcaacttgaacttcttttttacataattctatgtttttatcattaataattgcttctttatcatctaattttatggtattttcactaattaaccaatcttcttctattattttttcttctatttcattatcatcatttactacttctactttagttaatatttcattatcaatattaactacaactccttcttcatctatcaacttttcttcagataatattttttcgttttttaatattacttcaccttcttcttttactgactcacttttttgtctttttttcacaataccaaaccacttttttaacactcaatgttcctcctaatactttattactattctatactatcatataaaatattactgttcttataaatcacttaattttcatatgtttttgatatgatactcctcatgtttaaagaaaagatattcaagtgaaaaagatgacctatttctagtagcccaacatgacatcaaacttaagatatgcaattactgttcctaaactaatccatacatcaatttaggctagtagatttttactttctacaccactatcaaaaaacttactattatacttaggatacaatataacatttacataaatagactatattatcatttgatttgtatttattgcccataatggtattatatattaattatttacataatccaacaatttctatctatcaccttatatcttatatgtaaaaatacattcaataataattataaataacaaaaatggatttaattaatcatatagaccttgaaactcaacatgattaattaaatccattataattaatataaaaaatttaaaactatatattagatttttttactataaaaggaatagttataattgtgcctattaaagcatctaccatatcaatcatagtatcttctaaccccccggcctgtgtagtagtcccaacaaaagtatccattaaaaattcacctatttcccataaactcgctactcccatactaaacataaataaaaatataactaaaaacactttactcattttacttatctctctttgtgtataaaagtatttaattatagaaaaagccacaatacaagatattatacctgaccataaatgcaaaaaatcatcataataatttatatcataaaaattaaaacaagtacctaacaatgatgaaaacattataaataaagcaagcattatatataattctttactcaataatctttcagtttgcttatttataaaactcaaaatgaaagtaccaactaaactaattgctactagacctagacttccatattctttgtttgctacaaaaaatacggcagataaaatataaactatatacaatagtatagttattggctttaaaagtttattcatatacactttaccttcctaaaaataattttataataacttaggattaacatcattatcaccatgtccataaagttttaatggcttaagagctggtccttcaagtatatttcccttatagtcaaatctagaaccatgacatggacagtcccatgttttttcttcactgttaaaattaagttcacatcctaaatgagtacatgtcgtgtctacaatataaaaatctccattatcatccttatatacaccatatctttttccatcaatattaacaatctttccttctccattatttttaggcatatctccactacctatttttaattttccacttacataatttattgctacgtttgcattttcctttataaaatcttttgaaaagtagctacctaatctggatggattaaaagtatctttataatcagaattattatttattatcaaatcttttattattattccagcagcagttccattagtaattccccatttagagaatcctgtagctacataaatattgtcttctcttttgttgatataaccaatataaggaacattgtcaaaactcatattatcttgagcagaccatttccccttaaaatcttttaccttaaagacttctttaccataatgctctaaatcatcaaatatttctttctcagttcctccctggccaactttatggtctcctcctccaaaaatcagtaaattttcacttccattattatattgtctaaaagttattgatgggtcatctatacttataaacataccatctgctaatttattttccaaaactgcaaccattaaataagcacgctctgcatattcttttgcaaaataaaaattcaatccatcataccatggactatgagatgaaattataacattctcagcttctattatattatcttctcttgttttaaccctacatatttttcctttttcaagatctactactggtgtattttcatatatttttagccctaaatttactgctgcttttgccaatccatcaatatacttctttgggttaaattgaccttgattagtaaaactaatagccccctttatatctaatggaatattttctatagtttcatgatactcacaatttattcctatttttttacatgtacgatattcatctttaatattctttatagtatcctctttttctgtaaatacaaaagaagtttcccttttaaaatcacattttatattgttttcttctattatttgttcaactaaatttaaagcttcattatttgcattataatatgattttgctttatctaatccatattttttctctatcttagagtaaaatatatcatgctgacaagttaccttaccagtattccttccagaagttccatatcctattttatcagcctcaacaagcactacttttttaccttcttttgctaataaatatgcagttgtcaatccagttattccaccacctactataagacaatctgtttttatattttcacctaatttgttatattcttttggacttgagtttaaaaaccaatatgattcattcatttaaaatactcctttacatattaaatagtaatagttttcccatcatggagtttatttattataaatagtataaaaaataagcttaataaaaagctaaatgaaaaatcacttagttttcttgttttatacaccagactaaacttatatatatttataatttctatattattttcttaatcaatagtatttatgctaagtaaaaatgaggatattctagatttcaatacataagattatattgtgctaacaattataaattgttagccaccaacttttttattgatttagttcgtttaatatttttctgatatgtaatataacaatctctctataaaaatatttacttaaaaatttattttatataaattaattgtaattcttacttatattcttttgtaaatagaaaaggagtataaaataatagtataaatatcaatctttgtataatactatggtaattaataattatttcagaatcattgaaaattaatcctaagctattaattagaacatgcattatagagcaaaaccatatgttcttagttttcatataaacataacctaaaaatatagaaagtccaataccatatatcaaatgggctatagctccaattattggagtttgaggactatatagtgtaaattgtaaaggtaagtgccataaactccaacaagtgcctaccattacaatacctatttttttgccaaatctatcaaataaaatactttgtaaaaaagatctccaaccatactcttcacataaaaaaggataaatatatactaatgatattataggaagaagaatataattcaagaaattcttataatcaaattgattatcacttattattaatccaaaaataatttgagaaaataaaaagtaaaaaactagcaaaatacctatcttaaaatttttaaaaatatataaacttgttattttataagaataaataataacacataaactacttattaaaattaacataaaatacattaattgaaattgattaatacttattaactttaatgattcaataataaatataaaaaagtaaataataaaaaataatattactgatgaatagaaattatatttatcattatttcttccttctgtgtaaaattttgcaatagaaactgaagataatggcaatatcatcataaattgagctaaaatttctgaatctattaaatgattaaaacatattgctaataaacctagtgaataagataaaccataagttatagaaaaaaatattataacttgtagtttttttctttttatttcatcactgacatatgttggctttaaaaagtttacccattttgattgtaaattcaacaaacataacctccctttttataaaaaataattgtaaaaatcataaaatttttctacttatactcatatcattatatttctatatatttataaagtccttattacttacacgactgctgactaaactcttataattctttttttgaatatgtatttacagaagaaatatccaatttcgttagaaatttattcttctgtttaaaatttatataaaaatcatttttatgcaatcagtttactattatttttttaatattacaatatatttttatatacaaaaaaatacaacaaatattattttctagttcgagtgaatattaaaataatatataattttatttatattctaacttaaaaacaatttaaatacaaataaagcaaaacacacttattttacttatataaaaataaaagactgtcaagataacaattacaaatcgttatataacagcctcataaaatccttattttaataaaatccttattttaataaaatccttattttaaaataattcagcaatatattaatttttataaaacatcatattttaagttcttgaatatcctttaattgctatacttcttgatttaatggttttttaagtaatgctaaaagcatcattccaaccaaagcacctacagctatagctaatatatatgcaaatggatgggtaaccactggtataacaaatactcctccatgaggtgcacgaagagctgcgttgaacaacatactaagtgctcctgccactgctgaacctccaacacaagctggtataacatgaagtgggtctccagctgcaaaaggtatagctccttcagtaacaaatgataatcccattacataattaactttaccagaatctctttcctctttagtaaatctattcttaaaaaatgtagttgcaagagctatagcaagtggcggaaccataccaccagccattactgctgccattatttcaaactgccctgattcaagtgatgcaactccaaatacatatgctgctttatttacaggtccacccatatccacagccatcattccacctaatactaatcctaaaactatttttgaagttccgcctaaaccatttaaaaatccaaccattgcattattaattgctgtaactggaggtattactaaaaatgtcattataattcccatcaaaagtgttccaagtaaagggtataacaatactggttttattccttccaatgaagctggtagtacactaaatattttcttaagcccttctactaaataacctgctataaaacctgcaagtagtgcacctaaaaatcctgaaccaccatcacctgctagagcacctcctacaaatcctacaacaaacgctggtctatcagatatagagtatgctatatatccagcaagtacaggtaacataaatccaaaagctttatctcctatccctttaaaaaacgctgctatcggtgtatttgaaccaaagtttgaagggttaatagtataatcatcaagtaaaaaggctatcgctataagtatccctccaccaataacaaatggtaacatattagatacaccattcattaagtgtttgtatacttttctaaatccactttcactttcttcatttgattcgttgtgacttccatctcctccatggtaaattggagcatctccatttacagccttgtctataagttcttccgctttgtgtataccatcagccaccttagtttttatgacttttttgccattaaatctagccatctcaacatttttatctgctgccactattatacatgttgcattttctatttcatcttttgtaagcttatttttaacacctgctgaaccattagtttctacttttattgatacacctttgttttctgccattttatttaaactttcagctgccataaatgtatgtgctattccagttggacatgctgttactgctaaaaccttaggatacttattagcatcattctctttagtatctattatatttttttcagccactttctcatcttgatattcttcactgaatttttctctttcctttttatctattatttccttaaattctttttcagagcttgaatttataagtttatttctaaagtcttcatccataagtattgtagataatcttgataatacttcaagatgagtattgttagctccgtctggtgcagctatcataaaaaatagatttgataaacttccgtcaaacgattcataatctataccttcttttgacactgctgctgctatacaagctttagtaactgaagaatttttagcatgaggtatagctacaccttctccaattcctgttgtactcatttcttcacgagccaaaattgcttttttgtagttttctttatcatttaaatttccactatttgcgaccaaatctactaattcttctattgcttctgatttggtttttgaatttaaatttaacttaattgacttttcatctaataaatctataattttcataaatattaattacctttctatatattttttaatattttaaaactgctttacagatatctcatttaccaatttatcaatgtattctcttttggctaagtcatatgaaaaagcagttgcactacctgaagctgctcccaatttaagagcataatcatatttcccagtattcaaatacccagatataaatcctgctaccattgaatcacctgctcctacagaattttttacttttcctttagggacatcacttataagcacttcatcttcctctgtaatcaacaatgctccatcttttcccattgataccaagacatttatagctcccatttcctttaatcttttagcatattttaccatgtcttcaattgaatttaatttaacaccaaatagttcttctaattcgtcgttattaggcttaattagaaaaggtttgtattttaaaacattaagaagaagatttttagttgcatctactacaacttttatattctttttttctaatctagccattatattttcgtatagtttttcatctaaagtagatggtatacttcctgccaatattaaaatatcatcttgatttagcttatcaagttttttatataaagtatcaatgtcttcatcatctatatttggaccttgtccattaatctcagtttcctttaacgcctttatttttacatttattcttgaaaaaccactttttatctttataaaatctgtcttcaattctttttcttccaatgttcttattatatattctccagtaaaaccacttataaaacctaaagatgtattatcatttccaagttccttaagtatgcgagatacatttataccttttcctcctggataaacgtattcttcttttacacgatttgtacttcctgtctttagctcatctagcttaactatataatctattgatggatttaatgtcactgtataaatcatattgccacctcttttttatttatttgctttatgtttatatcttaactttatattaatatccttgaaagtcaaaaaatttctcttaattaaaagagaaatttatcgtttttatcttatttagttttatattatccaaatttacaggtgtatatacaatactacccatctaattaaataaatttacaaatttttcaaaactactattttcacatatacttataacttttgctatagaatctactcttttatatatttttgaaaatattacttcataatctaatattttatctttatcaagggctaacattattattaaacgaacatctgatatttcccaagaaataggcttctttaatataccaattgctattttattatcaaaaatttttccaatagctccatgtggtatagttaccatattccctatttctgttgttgctattttttctctctcaaagtaagattttttcatatcctcatctatatagcccttttgtacaagtttacttgccataaaatctataacttcttctttccttttaaacaccaaatcagtaaaaaataattcactatcaaacaggctttttatatctaaatctaggtatatatttcctgtttctatatatttttcaattaatctaatttctttctcacttaaaattggagatatatttattactggcacatctcctacttcaataggaacagtagatattacaaaatcaacatctataacttttatatattcaactaagtatgaaggaataatctttagtatttctaatttttccttaaatatattctctaatttagcttttattaacattgatgtgcctatgcctgaagtacaaactattatagttttgaaaaccttatctttattattataagatgctctttcaactgctcctcctatatgtagagctatgtttgcaacttcatcttcattaatttctatcttcaaatctttttctattgtctttttagctatattagctagttcaaaagcaaatggatattttatttttatatcttgagccattataggtgattgatttatacctaactttatttttttacataaactactaatatgcttatataaaaactcttcaaataccttatcattacttatatctattgatgtagctaattttaaatttttacaaaatgtttttattgaatttattataatttctttgttttgttcattttctaaaattgagcttcttttgctcctataattttctatataattctctataaattctttttcattatacttatgtctgcttaacataactaatatattatttaacacactcttaaattctatatcagttaatactaatccattttcatttaatatgtctaataataatttttttattaatagttttctttcctttatatcgtcatttaaaaaatcatttaaactcaattgattatctctcttattgcttaagtcaactatacaatttaatatcttatcttcactttccaaaacacatataccttgtttatgcttagatttaactgatattgaatacttttccaatattctttttacttcttttaaatcattttttactgttgaaacacttacatacatagaatcggctaaatcttcaagttttatagtatttttttcttcattacttaaggttaatatttttctgattatatattctactctatctacatcatcatagagattgctatttagatttacctcatcaaaacttccttctagtttataaccaactcctcttattgacaaaattttaccatttctaagttgtttattaatatcctttatttcattttgtatagtttttgaagaacatcctatctcttgacttaaggcaataccactaattgtatcttttgaatttaacaatatttttattatatttatctgtcttgctgttatatttaaactcataaactcaccttttactctagatattgatttcttaattttcttatttcttctttatttaaattaaattctccatataaatatgcttctacactaatgtattcttcatcaattcttctaaatgcagttttcatatactcttcatttacaccaaatatatattttaaattttcttttggaatgtccttaaatttaggcttatattctataaatctttctatctctttatctgcaaaatcattactttttagataatctttcattatattctctctcgatacccctaaaatcataagaattatagcactccccacaccagttctatccttaccagctgtacaatgatttaatattggtaaattagaatagtctcttataagttctactaattttttatatgacggattatttataggcaaattatagtaactattatttaacatattaaatgcaccatctttttcaaacaatccatcaatcatatcttcaatagaaccaaaacttcctcctgattcttctagctctctcattgctggtattcttatattttttatatttgatattattgttgatggatgtttacgagcttcttcatcacttctataatcaaatatatatttaatatttaactcttttaaaatctttatatcattttcacttagatttgataattttgcagacctataaaataatcccttctttacagttctgccatcctcagttttgttcccacctaaatctctaaaatttttcatcttagcacctcttaaaaaccatatattatactttttttaatatctataaattaattttatcacaattttaagttctttatttaaaatattttttagtatttggttattaattgtaaaatataaaagtatctctttatacaaaattaacctaaattttacataatttatttactttacataagctttatagtttataatcaatatacagtagtatattttctgtaaaaaagaccatatttagaataatatcaaatacattggaggttttatattatggatattcaaaagcaaaagaattttataattaaatttacatatgtagttttaataacaagtattgtatatattgtattaaaattcttattgccattattaatgccttttgtaatcagttttatcattgcatccatcttaagacctattataagacttattacaaataatacaaatttaaatcgtacacttatttctatagtaatacttttaattttttatgggttgtgtatatttttattagttagctttggtgtgaagatatttgcaagtgtaagtgatgtattttttagacttcctgaaatatataaatcaagtatacaaccaacgctaaatactttattttcaaagatagatgctagtacacctaatgttaacctatcattaatacttggttgggataatataagtcaatctatgatgtctttagtagcttctatttcaacaaatgcactcaatgctattgctagtattgcaagtaaaacacctgcatttatgttaaaacttattattactttaattgcttcttttttctttacttttgactatcaaaaaatagtaaactttatcttaaaacaatttccagaaaaaagtcaatttatgataataaatataaaaaatagcagtattaatgctcttttaaaactactaaaagcctatgcaatactactatcagtgacattcttagaactacttattggacttactatcctaaaggttgaaaatgcatttactatatctgtcatcatagcacttgttgatattttgccagtcttgggtacaggaagtattttgacaccttggatgattatctcactcattaatggaaatattaatttagcaataggacttttaatactatacataattataaccgttgttagacaaatattagaaccaaaggtagtaggacaccaaattggcctatatcctttaataacattaatgtgtatgtttattggagctcaactatttggaatagctggattatttggattccctatcgcagctacaatcataaaaaacttacatgataatgggattattactgcatttaaatagtttaaccttgacatttttatttaaattaaaaagggctttctcaaacagggataagctctttttaattgttaaaatgatgaaaatacatttgattttatacaaaaagagtgcctcataaactaaaaagtctattctaagacactccctttttttctactctgcacaaataatatcaatcatttctttatattcattttcattatttaaaacatctatatttttaaatttttcttttattttttcttcaatctctaatgaataatctattgtatatggaataaatttctctacttcttttatatatcctacagaaaaaaattcagcattataaactacagaaaataaaattaacattaagcaatcattctttatcatagttattacagatttatttttattattaattttaaaactatctattaactcaatagtaaaatttattagtttatttacaactttatctaaagtaccctcttttgacatctctgtaataatagttttatggttgtattttaaatcttcttttatatcttgtaaatcatcagatatttgtaataaaaatccatatcctatacaaaactctatttcttcctttgtcataaatccacttattaaatatccatctactaaaacggatgaacctcctttttcaatagaaatggataataaatcttctttacacaaatgattttccttaccatgttgttttaaactatttacttgacttttaaatattaataataacgattcataaacttgtgtaaacttttctctagggtatacactttcaatataatctatcatttgagatactttactttcatgataatccttagatttaatatgttctcccaggagccttttttctaaccagttattaaataaaatcttatcatttttatctatatttgtattgtctaaataattatcagtatatggatataacatactatatgcaaagttagcttttgaataatatatttctttaccaaataataattgtaatgcatttgaaatccatacattcctcatagcttgcataatatcacctataggtaaatcatcatcaaattttctagcatctctaataaactgttttgttatatctaaaaatttttttctatcctctacatccattttttctaacttaaaaatattttctttttccaatgtcttttgtaagaaaacctcgcccttttttacccacatttttctcaatacagcatcacttggatacctctctaaatgaactgatattgtatttataaatttatctaattctttttccctctttttttgtgaatctttactatacgtttctatatcctcaaataattcaacactcgaattattccatgtattttcacactctttacaatagtatttaaatatgccacttaaatccatttaacagccctactttcatgcctaaactatacactatattatatcagtacatataactaatatacagttaaagttataattgtgtataataataactttaaaattatttgttttttagcttagctaatgcttctgcaaatggattattaaatgtctcttgatttttattttgattttttaaatattgattaacatctttttttgatgccttctgtttttcttcttgctttctcttgttgaaagaagacaacttttctctgtatccgcaactacaagtgaagattctcccctcaccttctccacgaagttctaattttttatgacagttaggacatcttgaattggttacttgtgatatagtttttctagtattacactctctatcttcacaaatcaacatcttaccttttttaccatttacctctaacataaatttaccacattctggacatctatttttagttaagttatcatgtttaaatttattatcactattttttacttctagtacaatatcttttgaataatctttcatgtcatttatgaatgtatttttactaagttttccctttgaaatatccaataatttcttttcccatgaagctgtaagttctggtgtctttaagtctactggaactaaatctaataattgtcttccttttgatgttatatatatctctttatttttcttttccattaaaaatgaattgaataatttttctattatatctgctcttgtagcaactgtccctagaccattcttttccatagcagtcaataatgttccctcatttaagtatggtggtggatttgtttttcctgaagttatctttaatcccttgaccttaagtacatctttttctaaaacatttggtatactttcatactcatcttcatcttcaatatctttataactttctttccaacctaaatttattactttgtttcccttagccttaaatatttctccttctacagttgcacttatagttgtctgctcatattcaaaaggaggagatagtactgctaaaaatctttttactacaagattatatatttttcgctctttgtcactaaaatcactcatgaataccttctgttctgttggtattattgcatggtggtctgttacctttgaattgtcaacaaacgatttattagctataatattgctttttaataatttattacaaatctttgaataatcactaatatttacagcttttattctatcttttaatgttccaacaatatctgatgttaaatatctagaatcagttctaggataagtaagtactttatgatgttcatacagtttttgcattatagataaagtttcttttgctgaaaatccaaacattttatttgcatctctttgtaattctgttaaatcatagagtgcaggtgaatattttttcttatatgacttgtttacttcagatatttttatgtctacaccttttactttttttaatatggattctatcttttctttactaaaagttgaagaattattgtttttatcattccaaataaattttatatctgaatttccctttgtagcaattaattctaatccataatactctttaggtttgaaatttcttatttcttcttctcttttaagcaacattgcaagagtaggagtttgtactcttccacaagaaagctgtgcattgtactttgttgtcaaagctctggttgcatttattccaataatccaatcagcttctgctcgtgctattgctgagtaatacaaattttcatattcttttccacttcttaattttgcaaatccgtcttttattgctttgtctgtacttgaagaaatccaaagacgttttataggtttttttacctgtgatttttctattatccaccttgctacaagttctccttcacgacctgcatctgttgctataactatttcatctatatcatttctattcatttgcgatttaactgtattaaactgctttccactcttttttattacaacagtcttaaggtgcttgggaagtattggcaggtcttctaagctccatgatttatatctttctccataactttcggggtcagcaagtgtaaccaaatgacctagtgcccaagttatcacatactttggcccctctatataaccatttttttcattttttgaccctaaaacttttgctatatctcttccaacagaaggtttttctgctagcactaatatttttcccatctaaaaatacatcctttctctatacataatctcatattacgcttaaaatctaactaaatagaacttttcttaatatcgtaactataatattaccataatttaatcatatctaattaattatttaagattttattatttttttatttaaaacttattttacacttcatttgtatgtgtattacaaaattcatttttacgtatattactcatctttctaagtttataattcgtaaataggcttacatttttatattttttctttgttttttaattttttagttgacaaaacataaaaacttatattaatattattaatacaataagctatgacaaatcaatatccggttaagattttatagaagagttgctatatagcacaccgaaggagtaacactctcaggtacttttaaaagtaggactgtaaaatttacggaactctggagagacccattatgggcgccgaaggggcaaggcttttatgctcaatctctcaggcaaaaggacagggattatctaccaaaaacagtatttactaatacttttattttggttgctaattagtgtacatccagagctgaatcttttttagatttagctttttttattacactagaaattattaataaattatacttatttcctgtcaattacttcattaaaaattctattgattatgtaaagcaaaaaaaatgagggagtgtttttatgaatctaattgatattttaaacaaagttgatgcttttatttggggaccacccctactggtactattagttggtactggtatactacttactgttaagcttggagttgttcaaataactaaactgccaagagctcttaagttaatattctctgctgaaaacaaaggtagtggtgatgtttcaagttttgcagccttatgtactgctctagctgctacagttggtactggtaatattgttggtgttgctacagctatcaaagctggtggacctggtgcacttttttggatgtggatagcagcattctttggaatggctactaagtattcagaaggtgttcttgcaataaaatacagaactaaagataaaaatggtcaagtgtctggtgggccaatgtattacatagtaaatggtatgggagaaaaatggagacctcttgcaatatttttcgctataagtggtatactagttgcacttttaggaatcggtacttttactcaagtaaattcaataacagatgcaataaataatagtttcgggatagaccctagaattacaggggttgtattagcagtatttgtagctttggttgtatttggaggacttagaagtatatctaatgtagctactaaaatagtaccttttatggcagttatatatgttgtaatctgtggaatcattttaatatctttttggaataaaatccctgaaacttttatgttaataattaaaagtgcatttacacctactgctgctactggtggttttttaggagcaactatgtcactggcaattagaaatggtattgctcgtggtgtattttcaaatgagtctggtctaggtagtgctccaatagctgcagctgctgctaaaactgaatggccagcggaacaaggtcttatatctatgacaggtacttttatagatactattataatctgtactcttactggattctctcttgttatttcaggagtgtggtgttcagacctaaatggagctgttatgacacaagcagcttttaacggagcaattcctacatttggaccaatattacttacagttagtttaacattatttgcatttactacaattttgggatggagttattatggagaaagatgttttgaatttctgtttggtgtaaaaggcatgaatgggtatagaactgtatttgtggctatggtgttattaggtgctttcttaaagttagaagttgtttggataattgctgatattgtaaatgggcttatggcaatacctaaccttatagctttacttgcattatcacctataatagtatctgaaactaaaaaatattttgaacatataaattctccagaaaatcagataaagaaaaatgcataaataaaaagtatagaatcccaagtcaattttatatggctttcggattctatatttttttgaaaaaatgtaataaatatatttacaaaatacggtgattaatataataaaacatagtaattgatataaataatacatatattttaattaaccacttcaatgaaaattatttagattaaaactttatttcttctgggtatttccaagattcaaactcatcaacatctactacttcaagttctttaaattgatttaatactaaagacctatagtatatttctgctacctcttcaacatatcttgattttaataatgcttcgtctaaatcattacctacagttgtcaacccatgtctttctaataagcatgcatctgtatctatcagtaattttgaaacgctcttagctaattttaaagttcctggtctttcgtatggagcaatatctacataaccgccataattaactgattcatatacaattggtataattggtttctttgctactgaaaatgctgttgcatataaagaatgagtatgtgatatagcatttatattttcccttattttatatatttcaatatgcatcaatacctcactacttggcttaatacctttctcaacttctattacatttccattcaaatccaatacacaaatatgttcaacgtttaattcttctcttcctatacctgatggggttataagtatatatccagtatccttatctctaatactaaaattaccagtcttttctttacataaaccataatgctctgctttaattgctatttccacaactttaccttttaaagagtctagcataattcacctccagataatcatttttgaccatagtatgcattttttccatgttttcttgaaaaatgcttattcataagaaccttatccataatattatcaggactcattaactctgtataataagccatctttgcgacttcttctaaaactactgcattgtgtacagcctcatttgcatcttttccccatgtaaaaggtccgtggtcatttacaattattcctggacaatgaattggatttcttcccataaattcttcaatgattacatttccagtttccttttcgtattcattgcaaatttcttctctagtcatttttctggtacatggtatgcttccataaaaataatctgcatgagtagtaccacaagatggtatagattttcctatttgagcccaaattgttgcccaacttgaatgtgtatgtactattccccccaattcttcaaactctttatataaaactagatgagtcggagtatctgaggagggtcttagtttgccatcaactacatttccctctaaatcaactacaaccatatcttctacagtcatattactatactctacaccacttggttttatcaccactaatcctttttctctatctatcccacttacatttccccaagtataagtaattagctttttcttaggtaattctaagtttgcttttaatacttcttcttttaaaatttctagcacttttcttcctcctatattttatttaatgtcatagttataaaatttaattgtttttagaattttttattaaatttttatatttctactaggattttattgaaattaatttctctcttgctcattttacttaaaaagtcacccacttcattaagacctattttatgtgaaatcatgggtttaaaaataatgtcaccttttcccataaaatccaatgttgcagtccatgctcttccaggataagggcttgcatatgaattccaagaacctttcaaggtaagttctccacgtaatatacactcagtagcgtctgcactaagtggtaattctgtgtgtgatatacctacaaacactatatttcctctcttttttgctacaaatagagattgttcttgtgtaaatcggctaccagcagtctctattacaacatcagcaccaccatttgttattttttttatttctttgattacatttacttcttttgagttaagtatatagtttgctcctagaagtttagaaagttctaatttttcatcaaaaatatcaactgctataatcttagatgcaccaaacacctttgcccattgtataacaaactgacctattggaccacatcctaacacaactacactatctcctactctaatattagactttgaaatcccatgataagctatagttgctggttcaattccggcagcagtttcataatccaatgtatctggtagttttaaaatatgttcttctggaactcttacatattctgcaaacgctccatttactcttgttccaattatattgtaatcatcacacaagccaaaattaccttcattacaataatcacattttccacaaggtactaatggtgcaacagctactctatctcctacattaatatgctttactttttctccaattttaacaacttcaccagaaaattcatgtcctaaaatcaatggatattttgtatttccactcaaaccacttaccatagacctaggcaaatctgaaccacatatcccaacatattttacatttacaagcacttgcgtatctgttatttctggtatatctaccatttcatacctgacatcacctacattatacaatactgatgctctcattttatctcccatataaatatctcctttcatgctatatacttctatatagcaatatctatgccatacaaaagataaatggtttattcaggcaaatgccttatatacaaagtcttttaccagtagagattacattttataaaattaaaccacattactgtataaatataaaagagtatgttttaaatagcaggttatacagaaaactcaactataaaaatacaatgcattataattacaaatattatcaaataaaaagaagtctatatttcatttaaatatttctcaggtattatctgatacttatataaaatcaattataaactcctttaattattcttatttcatttttataaacttaaactgctacaggctcttcttctacatttttaagtgcttgtttttctaaataatcaagaatacttgttttgttctttctaaacaatgcccatagaacaaagtaaattacaactgaaagacctatataaattggatttgcacttagaaatgcaaagaaaactaatcccatcaaaggttttcctagtatattaaagcttgttattaacattgctcctgcaggtatagctacacctatatttgtagccatatctgtaaataatggtgctgtagatgtacaaacatataatcctaatccaaaccaaattatacctgaaactaatacttttggtatattaccattatgtatggcaactaaaccttgaaccatatatggaattgccaacaaatccacaactggtaataccttattaccaggaagtaccatagatattacaagcattattggaattaatataagacctgatattaaagttgcaggttcaccatatccaacagcatcatttactgctatgtaccactcacggtttccagctttttgcataatctttctagctgcttctgttataggtgcaaatgcttgagcaaacatacttgctactttagggaaaatcgccatcactgcacttgtagatatacctactttcattatttctccccaagcttccatagtatttattctcgtcatattacctaatatacctataaacatacctaaaaaaagacctaaagtaattggttcacctaaaaaccctaatttcttctctaattcttttggatttaattttattttatttaatcccaatttattgtatatagggtctgaaaatactgcaaacacagaagcctcaacattatgcatagctattattgtacaattaggatatctatagtaactagaccatctctttgcaactaactctgatattaataaactatataagtttaataaaaccatacatgctatacctaaaggaaaatttcctgttactcctataaccattgctccccataccatataagaatagttattccataaatctgatggttgaaacacgtctgtccattttatcaaaaataaaattgtttgtaataatataccaagacctaaatatatcatacctgcacttgttgaaaatgcaaccaatgatgttgcttgccaaccaacatcaaaaactggtaggtttactcctgtactctcaaccatcctattgataactggtgttattattggtgtaaatgaatttaaaatcagtgtaaaaccttgtaaagcaactcctgcatacacagcagaaagaaacgatttcttagtagttactttaaatatctttgctattatgaatattataattggaactataattgcagaaccaaatgtatcgattatagatttcataaattctaacatctttttccctcctacttataaatatttataagcttaatttaatacttaagtgactatttttataattttttaatttatgacaacatataaaatgttttttccacaaatatttagttaatattagcttattatagtatctaaatcattgatttaaatactataaattcacgtctccaaaacttacttatctatgccttcaataacagtcaaaacttcttcaaagaatgcctcttcccctataccagttaggcaagcaaatgcatttatagttggtattccataatcgcctgtttgaagcggactcgtaaatgttataaagtcaaatcttcctgattgtgctaaatttagtgcttctgttggtctagcttctgttgtagtaatagaaatccccttattacctagtacttcttttaatttacctgctaccatagatgatgtaactgtccctgaaccacaaactgataatacattaaattgtttcataataatttcctcctaatttttcactctaaatttttattttatataagattaaacctattaaaaaaataatacttactttgattgttgaaattttaattttttatttataaaattctcctacattaaatttctataaaatccaataatttagctacttcttcttttgttgatgcgttttttatattttttaataactttatattttgaaaaactgacattaaatcttttaacagttttacttgtgaatctgggttctttactgctaataaaaatacaagttctacatcaagtctatcttttgggtctatcattgaattaaactttacaggatttttcaatatccctacagctacattagactcatttacatgctttgaatctgtatgtggaatagcaacacacatttctccaatatctagacctgttggtaatgtcctttctctttccaagacagcatttatgtatgtttcttttacatattcttttttacacattatacttcctaattcttcaataacactttcataatcattagattctaaacccaatgatattaaatctacattcattactctaactcctctcaatttttttgctatggctacagatgtttaaatttatcaaatataatccttctaaaagcatctttatcaaaacacttattggcattgttcataaattctgcatcttttagtatctcaagaacatttttaacaatctctttatcattagcctgaaaaactggcataaatatgaaatttacattacctacaccccaatcaataggattctttagtttaacaaaaacaaaccttgtactatttacagtagaagaatctccatgaggcacacctatagctcctttagaatatgttggaagcatttcttctctatgtaaaacagaatctaagtaatctttttctacatattctttatttataagaattgaacatacatattctaataaatcctttttaaaatatatatctggttcaaaaatcactaaatcctcatcaagcattctttcatacgatttaactggtctgtcatcttgttgttttgattttgatagatagatatccaaatttttgaaaagttctttattatagggtataaaatttatacctggtatcttagggtttattgtcccaacaatagctaatatattgtttgtctcttttagattttcaattttacaaaataaattttcatccaatgcactcatttgataacatttagtgttatcatacttttcttccaacgttttacttatatacttagcagttccttctccagtaagacataatgttacaattgcatttgatttatctatgtgtttttctaattcatagttatatcccatcctatcttttagcaaagaaaaaaatatttcatcaagttcttcctctcccatagaaacttttctagttgcttctagtgccattaggaggtctactctatcaatagttttagtgcttatattggttctcttatttactatttgacctatgtttgtaagtgaaccaatatccaccaaaaacaatatacctttcccttggtctattatttttgacagttctactgccttattgtatatatttattggtttttcatctaaaggcatatctatagccacaggaaactttacacctaaaagttctttaactacatttacagtctctgtagctatacgtccatgagaaattattattaaccctactttatcttttttcacttcattttttagagcagactttatgtagagtgttataaatccaatttcatcatctggaatcttaatactaattgattcctcaatttttattgcaaaacttttactaatttcatattcttttgaaaagtcaatctttattttttctaaatttacatttattatcttttgatttagcttaattctttttatagcttcttctaagtgtattgctagatatttgaacatatttttatttacttctaaattcatatttttttcaactatatcattcataagttcttttaccagtttaactaaactatcacttacaaaactatttaaatcactcattgaaaaaatttcttcattactatcgagattaaactttaagtcagcaaatctatttaaaataaaagtccataaaatattctctatatctatatcttcaatgtctagggattttaggtcataatatttcttttcaattgttttgtatatgtcctctggtaatatatattcatcacttaaaagacttccttttactgatgattcttctaaattaaatggtataaatatagcatttttcaaatattttcttatctctgtatattcaatctcttgaaaggcagcatctttaaaagaatctttaagctttaaaacttcatttatatctactactactatcgattcactatcttcatctttggaatttataaacttcataaaagctcttgcacaaagaacctgaatcatattttgtaattgtcctatatttccactaaacttttttagtacaagtatttcaatcacatttttatctacaaatatttttgcatttattctattacactcttgttgaaagatattgtatataaggtctattttctcttttagtaatctatcatgtaatggtggcaaagttattagcattggtatccttcttctgaatgttaataataaattagtctctacattttcagtagttgccccaatcaacataatacttacttttctttcagcattagtttcacctaatctcctaaactttcccctatctaagatagaaaatagtatttcttgaccttttggaggcaatctatgtatttcatccaaaaataaaactccttcatcagcttcttctacaagacctggtgtatcatattcagcacctgtaaatgcaccttttttatatccaaataacaaagataataataattgtggattgtcactataatcagcacagttaaatacaacaaaattggagctttcttttactatctttttttgctttgcaaactcatacatatgtctagaaaataaactcttaccaactccactttccccaataatcaacgttggtaatccttttggtggatacaatatagcagatttagcctgctccacagcatttctaagactccctttattacctatcagagtttcaaatgggtcattcgattcttcttcagattcctctactacatccatttctaaactttctttaggtaaaagttcctccacaactcttctcgatatattaaagccttctgtcatcaattcccttgtaatttctgatatagaaatattcttattcttttgtaatattgccgaaattgctgattttaaataaggatatcttctttgccttgaattacttatattaagttcttttctcaaattagttatgttctctctagttgtacttaaaaactttgctatttgaacatctgttaatggatcttttttattttctgtatttatgatgtttacaagtttatctctcaactccatgcttaataactcctttcttgataaatatataagcaactatcatgccatacttactttgatatttttttctacttaaaccctgtaagtaactagatgtcataagtatttatacattttgataagtatttacattttgtatatttagtaatttactaaatgtattagttattcataatcttaaataatttaactctttgtttaaattttaatgcaaaatactttataaatttatgattgaaaaacttgctcaatcatatataatagtacgtatctactcaacaataaaaattataataaactgtgtttttaaccctttctattttaagattttatttttatatgatagtatacatacttatataggtaaggttttagctatataaatagttttaacatgatttaatatggcatattatactattttaacttaaaaattaacttataaatattaaatttatatacagaagggaaaacgatatgaatacatttaaaactgaagttttattaaaatattctgcaaaagacatatttaatatatttacaaaatctgcaagactaaattttcctaattttaatgagaaaaaagcagtaggaacatttgtacaacaaaaaaataataaaagatttaaggttgaaataactaatttcgaaaaaaatagagtatatgagataaaaacaagcaataaaagagaaagtactattactagatatgaattagtacatattgacttagaaaatacaaaacttatttttattgaaagtgagagcaagaggaatatatttggaaaaatcaattcagctcttgtaagagtattgtttggaaaaaggcaaccagaagaatttaataaatttataaaaaaactagaaatggaattggagaataatagtgttaatttatagatataagttagattatatatttaaaatctatctaaaaacatatttctaagtattttatgagtcctactattcgttacaataattaatgaaaaaactattgataaacatgtgacactatgactatataccacattaagagtatcattagcaataataattttatgtattattgcttttagttaaaaaaagagagaaaaattaataatctctaatatcccttaaactttcaataaagaggataatctttatctaataagattatcctcttctaatttagaaaagatattaatttattcactatatagtatttttgtacaaatcaataaaaaatatatgtcatattcttatctctaatagaaaatatattcccctcttccataaaactctcaatatcttttttatctataaatctatactacttagttctcaagcataaaataatataaagattctttatacatgatgatatattatattgactattagacatttgtctaatataatcaagttaaaggtgagtgattatattgaaaaaaataccaaaatccgagttgttagttatgaatttcatatgggataaaggcatagataaaataccagccagagaagtagctaattatatggaaatttctcatggatggacaaaaggtactactggtaaagtactttctagattaagtgataaaggttttttagaatttgaaaaagatggtagaaatactttatacactattaaagttaaacatgaggaatatctaaaatttgaaacaaaggattttttagagcttatacataaaaattctattcatagctttatatcatcattaggttgtggaaatgaaatatcagatgatgacataaaagaacttgaacaatggctaaaaaaaagaaaataggagacgtattttatggaattatttatagaagttattaaatttaatatttacataagtctactaattctttttttcattttatttactaaaaagataagcaaatatacttttaagtttaattattttatatgtcttttaatagtagtcagaatgatgtttatatctaaaataaatttaaatatattaaatatcaataatactactattaatatctataaacataatctcgataattatataccatatgaccagggcattactttagatatatttatgtacatctggatattaggaattatagcaatctctttttactatttaagaacaaattttaaattttataattacatagaaaattttaaaaaagaaattttagaaatagatattactagtatcttagatgaacaagcaaaagaactaagtataaataaaaaacttcagatatataaggttaaaggtatttattcccctgccattataggtttaacacgctgtaaaataataattccagaaaaaaagtacaataataaagagttaagatttatctttaaacatgaattaattcattataaaagaaaagataacttatttaagcttctaattagtataatatgtatcatacattggttcaatccaattttatacttattaaaaaaatattttcatgaattatgtgaattatcttgtgatgaaattgtgattgacaaatgtaccacgagtgaaattaaagagtatgcatatataatattaaatacaataaagtatcaaaaaactttgaagtattcatcattcgtatctcagtttctaaataaaaaaaatattattttaaaaaagaggttaaattctatgtttaatcaagataaaaagaaaattaatttaggtcttaagtttttattaacctttataataatagggtcaatattttctatcaactccaattttaaacaaaatgaagatgtagaatatactattgctaagattaattataataaaaatggagaaacctatggtacacatataatagactcaaatggaaattccattgaaccagaacttatacaaacaataggtagaggtaaaaaagtcggctacgtaaaaaaaagagatttgtacgattgtgataatcaaccaaagacaccagaagaagctgttttatatacaagaaaaagaaattttaatatatttaaaaaaacaatccctctttatgataaagaaggtataaaaattataggaagatttgaaatcaattaaaagacaaaaactgatagaattatttcctatcagtttttatttgtatctttagaatttattgttttagataaagaaaaaatcaaattaataatgtgaggtgaaaacttatgccaattaattcttttgaaaattatcctatgaactggaaaccaaagagaccttcaaaagggcaaatattatataaggcgcttgcagaacaactagaacaagatatcaacaatggatttttattaccaggtactaaattaccaccccaacgtgaattggcagatttcttagatgttaatgtgagtactatctctagagcttttaaaatttgtgaaaaaaaaggtctaataagtggagttacaggaagtggaacttttgtatcttatgatacgcgttcaaatctattcttgatgtccagtaataataaaattacatttattgaaatgggcacaatgaatccagatttcacactagaagaaatgaatactttgtttaaacatataattaaggaaatagattttaaaactatattccaatatggacaaagagatggtgctaaatggcaaaaagaagctattgccaaattaatttataaagctgggcttgaaactacatcagatagcttacttcctgcaagtggtggacaaaatgcaattgttgctattttagctggtttgtttcaacatggagatagaataggtgtagacccattaacttatcctggaataaagacagcagctaaaatgcttgggattcaactaattccaattaaacaagaagataatgagattagtgaagaaggactattatatgcttgtaaaaatgaaaatattaaaggtctatacataataccagattatcaaaatccaactacacatataatgtcacaaaatggacgaaaaatgattgcaaatattgcatctaaatacaatttaattgttattgaggatgctattcatagtttacttaatgaaacacatttaaatccagtggcttcctatctgcccaatcaaacaatttatattacgagtttatcaaaaattattgcacctagtttacggctagcatatatctctacacctaaacagtatcgagaggcattatcaagcgcattatacaacattaatctatctcaatcttattttttaacagaaattgcttatcgcatgattacatcaggtgaagccgataaattaattaatgcacgccgtaaatctgcaagaagaagaaacaagattattaatcaatatttatctggatataatcttttgggaaatgaagaatgtatatttagatggttgattctacctgatggaataatggcagaaaaatttgagatacaagcacttaaagaaggtgtacaggtctatgcttctgaacgttttgctgttggaaaagaaaaaccaatttctgcaataagaatagctgtatgtgctacagaaagcacagaagaacttaaagctggtctgagcgtattaaaaagactattagaagagaaaaaataattgtattgcacacaatattttaattgtgtgtatttttttttgttgttaaaataaaattacaccagatagtaattaacttatagagattaatatgtattattacatcataataacaaatagataaaatttaataaccgtttaagattatttatttgttgtatagtattttatatattaatccaaatttatttttaattataattgcaattatacaattaatctatttttctgttttactaatactttaatacatttaatacaaaaggagtgatttattgtggaaagaactcaacaattaaaagaaagctttattgcttcaattcctatattcttaggttatatacctataggtatagtaggaggaatactattacaaaaatctggtctttcaccttttcaaatagcactaatggtaactttagtatttggaggaagttctcaattcattgcagcttcaatgatttctactggtgcaagtgtaacatctattgttttgactacatttatagttaacttaagacattttctaatgagttctaatttgaacatgtacataaaaaataaaagtccaaaatttatattgccattttgtcatactataacagatgaaacttttgcagttaattatgaaaaatttactgctggaaattggtctgatagaaatgctatttatcttaatttcttctgcttaatttcatcagttttagctaattttattggagcatttttaggagaaagtatatctatagacagttctatttctggcttcatattgacttctatgtttatagctttaatagtttctcaaataaaaaataagatttatattgtagtatttatatcatcaatcattatttctgttattttatatgcattattcaaaagcaatttagtaataatagttgcatcaattttagcatctttaattggtttctttatagaagaatcttactgtaaaaaggaggaatcttatgaataataattatatattttttattataattggaatgtacattgttacatatctaccaagagtgcttcctatgttaattttttcaaaaaaagagatgcctgattttttgaaaaaaatcatgaaatttatacctgtagcaatacttacttccttaactgctaaagatgtattttttaatggagatagtctatatttatctatagctaaccctaaaattatatcttttatgattgtacttcttgttgcatataagtttaaatctattggtatttctattattacaggagtgatatctatatatttatttggaattatcttgtgatatttggataatgttttattgtataagttattttaaaactatgtgtacaattttaatttaagttgttatattattgattttaaataaaaaacagagtgacttaaagttactctgtttttactcttcattctctactgtaaatattctaatatattataataaaagctttcgacagtaaaaaaaatatatatacttaaatactatctcattccatatttgttatttcttcttcatatttttgaaactctaaatttgctttaaataaatctccatctatttctatataaaattttccaccttgtaaagctactaaatctcttgcaatagcaagccctaatccacttccttcagtattccttgattcatcagctcttttaaatctttccataatctcacttgggtcaaaatttaattcataagaagatatatttttcatagttacctttacattttcaccatagtcatatacatcaatatagactctagtttcttctaaggaatattttgctatattagataaaagattttcaaatactctatacattcttcttccatctgcccatatatacaccttatcatttggaacatttaattttaaatataaattatttttagataatttttcttcaagttcacctatgctttgtcttaatagttgcactaaatcaatcttgctaatttgtaattctatattgccactacttactctactcgcttcaaataaatcttctatcaataattttagtctttttgactttgactcaagtacctttatataatcatttatatactctggttgtattgattcttcttttttaattaaatctacataatttattatagaagtaagtggagttttcaaatcatgagatacatttgttataagatcagacttcattctttcactttttacttgctcttctatagctctatcaagaccttctccaatattatttatattttcagctaaagacgtaaaattatcattcccagtaatttttatcttataatctaattctcccttttttattctttctgtaccttctattacgtaactaagatatgaaagtcttttagttatatatattgtaaatcctaaaaaaatacatatagaaaacagtaatcccatacctatacttcgagtgctaattaccatgattaaagctaaagatattatcactataacaataactttccttgctaaagatactttctttatagcgttactgacctcccttacagtttttattaaccataaaatcactcttactataatacttgtcttaaatatacacattttattttctaaataactcaattgcacatttataaaaaatatattatttgatactatcagtaaagataaagaaactaatacaattacatcaatatgataagatacagcaagagcatacatagttaaaattgcaattgaaataaatactagtattacattaaattccataggtatcttactgtatattagtaaaaatacattatttctttttaaaacttcaccttttattctgctatataaaatgatagataataaacacacaattgctaaacttaaacaagctacaaaaaataatcttactttttctgtagcttgtttaaatatttgaaaattagtgtatactattccatcttctatagttggctcttctggaaaagagacatatgcctcaaaggcttcatctactccatttagttccatactcagattattcagttcaaatttttctccatttattgttttaatatacgagctctttcctacattatttattatctctatattacaatagctcttagttttttgtttaaaatcatctaaattaccatatgatgtatttgtataaaatactcctgtatatgtattaataacatacacttttatattttttagataacttaaatattcttcagaagcttgtttattaatcatgattttatcatactcagaatcattactacttaaatctatacttttactttttgtttggagtttacttttttcttcactagttaactgactatccacagatatcttaaaattagataataagctttccactgttccttcatcaaatatattactatcataaaaatcattagatatattaaaaatcccactctttgtagaagttttttgtatattgtatttaggctcagcaagtcctattgtagccaacaatatagttaatggaaatgagatagatattatgattaatgaaactaattttaatgctctatatttttccaagttgcccacctcatctacattgtcagtattttatataaaataaagtttaagaaaagcataatccccatagagtaaattaaactctcagagaaaaaattaaaacatattaaaattcctaacatttgtgtaaatgtaaaaatgactaaaatcaaaatgcaattaaatattaaactcttttcttttataatttttccactaaaatttttcaatcttataaccaactccccacaccacctttaaaaatcttggttcttttggatttatttcaatcttttctcttattcgtctgatatgtactgctactgtattttctgaattaaaactttcctcattccatactttttcgtatatctcatctattgagaaaactcgtcctttattttctaaaagaagttcaattattttatactcaattggggtcatttttatgttttcaccatcaattttaacttcttttgttagtgtatttaactccaaagctccactttttaaaatttctttacatgtatcttcataattacctaaagttacatatcgtcttaagtttgatttaaccctagctataagctctaatagattaaatggctttgttatataatcatcagctccaatatttaatcctattattttatctgtatcttcactttttgctgaaattaaaattattggaatatttctttcttctcgtatttttacagttgctttgattccatctaatttaggcatcattatatccattagtattagatgaatgtcattctctgttattatttccaaagctttcattccatcatatgctttatatattttaaatccttctgatttaagatatatttctattgaatcaacaatttctttatcatcgtctactactaatatattgtacatattttcacttcctctattgtataataatacttatctatattatacaatatctttcacttactttctcaacaatgactaaattgttatattactttggcttacatttttgtaactttcccttataactatataataaaatataaatcttaagaaaatattatcctaattcttaaatatttcttaagatttaagataaattgagatttatttgaataaattgatttgaattatgttattttcagattacttttatttaagtattttgattggattcagctgaattaatgtatattaattcttattgaacagtttttatttttggggtggaagaatggtggaagaattacatttcactaattttcttccaccattcttccacccaaatatacttagaaacatttatttcactgcaataatagctacttatttaaattctatttttatacattctatctactatatactgtacatattctattaaaatttatataaataaaatacaaacttatttcatttttttaacatgttcagaataataaacaaaatgaatgtagaaaaagttataatttcataccttcattttatttattatgtatctagctgtcattttcttattttaaattcttaaaatattcttctaataaatttaaaatatcaccatctacttcatcatccttactacatagtgctgacattaaacttaatattgaatttttatgtgtattctttaaaaattcttttgtttaaaatctctgatattatttttcttttactaatacattatagtgtgtacgcttatctattttctccgtttctaaaaactctcttctttagtaatctttttaatactgtaaatatagttgtatctttccattcatatttttgttccatagacttggtgatttctcttgatattaataccttttctgattcccaaatatatctcataacttttaattccgcttctggtaatttactaattttcatagtatacatccctttaccaatttatgtatatgttaaattctatatcaataaagttttacaaacaaaagaattaaggtaaataattacattcgatttttactatatcattcttttaaatttctataatactcatctaataggtctaacttctctttacttacatttttatgtgtagtggtaagtgaacgcattatttttatgcttttactagattttagtacctttttcttaaaagtataatattctttattatctattattattttataatgatattgaaaatttataatatatctagccaaataccttttagcaactagcctttttagtagtatttttattgtacttttatgccatccataaatctgttttatttcttttacaatttcttttttaggcattagagtgtcttttttacataaatactccattactattaattctgctcttaataatttttctattaatatttcttctttcaatttatgtcacttccttaattcttctaacttaaattaataataggagctttttaagacaaaaactagaggtaagttttaccaaatattctacatatttagtctgtttttttaaacgtaaaataatattcatatatatatatttgtttaatttgcaaacaatgctaccaaacaataaatagctctattgtattattttagttgtagaatagcactaaatcgttagaatcaaagaaatttagtagcacaaaactatataggctaatgcttataaaataaattataagttatgttaacaagttactaaaagcatattttatttttgtttttatgaaagttttttaggtatgtaataatatatatcttttaaaaatatgtattcatgtatacatattttgacttattatactgataattcatataattattttgattttatagatacacagttagatgattttataatagagcataaaaaaaatgtagtataatcttgtttatatcaagttatggtattggtaagtaagtataattaaatagacattattttctgggtcctctttttattttcatctgcttttaaataatattattgacattgatatgactgtagttttctttattttaatccattgcttatatcttttctaacaagaaatgtcattttaaatcatttctataaattgtaaaataatagtatatttgtcatagaaagtgatttttttgtctatatatggtaaaatatagaaagtagaaatcaacaaaataaaaatttatatattattaattttatatggaggggaaataaatgaaaaataaaaaaggatttactctagtggaattattagtagtaattgctataataggaatattggcaataatagcacttccagcattatttaaaaatatagaaaaagcaaagatagctaaacttgaagctgatataagtgcaataaaaagtgcatctcttagttactatgctgatgaatccaagtatactgatggaggaatgatatcatgggtaaagaaagatggaaaaataataataaatgggggttttaaagatgacccattagcagataaaatagaaaatttagggatgccttataatggttcatatctgttaatgtcatctcctggtcatgaaaaatatctagaattaagcatacttccagaaggagaaataagcaaaagtggtctagataaattaaaaaatgattatggaaatttaatagacataacgaacgatcaaaataaaataaatattgtaataaaacttttaaataataaatcgaatacttaaatacaataaatttgatttaataattactgatgaaataaacaatcttgtttggagaaatgaaaaaagcactccccaagaatagaatgcttagttataactacagaagtgtattggcatacacttctattttttattatatcacataatttatgttgctaaaaatacctatttaagttgtttttaaattgtgttgagtaatattcttgatagtttatacattaatgaatttcaaaaaaataagcactctttataataaaaagtactttagtgtatgttaatgtcctatctaataaaattgtaacatgtcttatgctttagtatgataattttcattctctttattgttgcaacttatactatagttttgctaatttatctgcaaacacaacttctttattgcatgtgtatcaaccaaaaacatcagaatacttacttaatacatctgcaaaatcgtatctttcatctatagtattcttatttgacaatataacaaaaaatgaatcgagatatgccttttttataattagatatattttataaattctagcatatcatttgttattttctgatatgctattgatgttttaaatcttctatttattttattattttttacttttccaattgtacctttataggagttatatttatgtgatttatgaaaaaatgctatgcatttaagttctaattttttgataatacatctaactttcttttgattaataatgataccactatttttaatgtggcttccctgaggcacacatcttttttaaaaactcaagctcatcttttaaaaatttattttcatattctaattcttgttctcttgttaatttattttttctttagtgtttttgtttttattcattatggtcttcctttcattttgaaaaaggcatcaacaccactatgtaaaaatttttgttttcatgttgctataactgtgctattgtttattccaaaatacttagcgatttattgtacactatacttagttatcatcatatagtttataacatctaacttgaaccatatagtatagaaaacttttttatttttagtgcaccctctcctaatatattaacccatctttcaacttgagaatggtcataaactccatattgttttactattaaaatatctcttccttctctattcaaataaaatttagctacttttaatttgaaattaaaatcatatttagtcatacataaacatctcaagcgttagatttttactctaacaattatggtgcagtacaaatattgtataatactgattttctattgacaaaagaatataaaagagatatatttgtattataaagatacaaatatatctcttttaaaattactaaggaggataaaaaatgattcaaaaaaaaatttttatgggtttttgtggtttccttggatttttaagtcttagatatttttcatctggcaatgttactgatcttacatatattggattttttgcttttttctcaaactttattatagcaaaaataaatggtgataaagcagatgaaaggtatgtacaagatgaaaaagcagctatggcatttacaggacagcttgctattatagaattattcattttatggtgtattactatagtgtctaggaatgtagaattaatgtgtgttttactatcaattacatatgcaatcactttaaatgtttatgctataaaactttatattttagaggaaaaataatatgcccaaattcatttgtaacctaaaaaaatatagacaattaaaagaattaactcaagaacaattagcagaaaaagtaggagttagaagagaaaccattatgcgtttagaagcaggaaagtataatccttctttgaaattagcaatagatatatcaaaaatagtagatacacctattgatgaattgtttatttttgattagtttttgcattattaaaaatgtgttttaaatacaaacttaaattcaatctttaagtcactcctgactgaactatacccactgttttatacagttaaaacatgtaaaagtggttataaagtactagtgtcaatcattagtactttttttattatattcatataattaatagctatattttaaagtttactatctaaaaaatagcacgtcaaataaaaccctagatatttaaatttttttagagctacttaaaataaattatgctatctctgtacttaaatatttcctaaattcaagtggagacatagaatttaatctcttttgatatctaaaattattatagtaatatatataatcatctattgctttgactaattgttcgtatgtatcaaatttccttaaatagtacatttccacttttaaaattcccaaaaatccttccataggagcattgtcaatacaatgaccaactctcgacatactttgtatcatgccttgtgttaaaagttttgatttaaacaccctgctagtatactgatagcctctatcactatgaaagataggttttgcatttggatatacttctattgctttattaaaagtttcgaatactaagttattgttatttgattttccaataacatatgaaactatgcttctatcacctaaatccagaattgcacttaaataagcctttgtcccgttggttaatttaaattcagttacatctgttaaccatttttgagaagttttatctgcactaaattttctatttaatacattttcagcaattacttctggtgtacatttaacataactaaatttcttttttctacaaatagaccttaagcctacggctctcattagtctgtaaactctcttgtgattgacattaagtttatactctctgtttaactgcaaggtcatccttaaagagcaaaaaactcccttcttttcttcatatatattagttatcaaagttgctaatttaatgttttcaagttctaaattacttttatctcgattgagccatttatagtatccagaacgatttactttagcgatttcacataattgcataagcgaagcttttttttcattgaataaggattgaatagctttatatttattttcattcttggatagtgtaattaccaccctctttctatgttttttaacttttttaagaatgcattctccagttgtaatttgtgtttttctgcttttacaattttcaattccaactttatttcatctaattgagttaactcatcttctttttttgctttacctcttcggtcttctaaaccaactataccattttctttatatttaagagtccatcttctaacttggctgtatgaaacaaagtatttttttgctattaaattgtaattaaaatcatgctcaatacaatctttaacaatttcaaccctttcatctaatgttgtttttctagtctccataaagagtcctcccttcggggtttcttttatctccttatgaagattatactccttaacccaagcttttagtggattaacagacctcattttatatttttttgagatagtgtcataagatccttccccatttagataagattctatagcatttaatttaaactctttagaatagcatgatttgtgactttgttttattaaaccatcatttccaaaagtttcataatttcgcatccactctctgaatgtacgttttccaatatttaattcttccattatttttattactgaattttcaccctttaaatatgattcaattgcttcgattttttgctctgatgatactttagttttagacataacaaaaccctcctagttttagacagttttacatatttcaactgtctcctaagaggggtatagttcagacagaggggctttttattttttcaaataatttaacgttcatatataaatttattaatttttcagctagatatgttgaataatagctaattctattgtattattaatctgtagaataaaactaaatcggcaaaactagagaaatttagtgacgcaaagctatagggactaacgcttataaaataagttatgtcagccagttgccaaaaagatattttctttttgtttttcatgaaagttttttagggggataaatacattatgtttagagataaaatggataaatgtacacatatgctaactgcttatattggtagttcatatgattattgtgattttatagatacacagttagatgattttatattagagtacggagaaaaagttgtggaatcttgcttgcatcaagtgatggtattggtaagtaagtataattagacagattttcttctagaaaaccctttttagttttatctacatttacattaatatattggtaatataaaatgtttaaatttattttcatattaagaataaataaaaatgttaactaaaaattataattaaatagacatttatgttaatctatgatataatagtatttgtggtaatacacaagtaaatcaagtatatcttgatataggttaataggagtatttttaatgaataatggaatagtaaaatggtttaataatgaaaaaggatttggatttatatcaatggaaagtggagatgacgtatttgctcatttctcagctatacaaacttcaggatttaaatcattagaagaaggtcaaaaagtaagctttgatatagttaaaggcgctagaggtcctcaagcagaaaatataactatattataatatatagatttttcggaaagactcttttaagagtcttttttttatttacgcattttgtaaaaaaggaaaaaataacttcaacaagaaaatacttaaaaataatacttagtctaaatactttttataaaataaatctgacaaaaatatatttataaagtatgtacttaaacctacaagtactcttttaattagaatatatagtaatataataattttagttgtggcacatcaaaattttcaactatctcataaatacatactctttcttttgtattcaattctgatataacacttttagtaatttgttaataaaaagcaattaaaacatatctatatgtttcaatgttctattttttcactgaaatataataaatataaaattagttaaaaagtaaaaaatctacaataagttaatttgatttaagtttttaaatttaaaatactttaaagtattaataaaaattaaaaataaaataactacctatggaaatgacattataaatagattttttcttaactatacataataaaacataacaaaacattataaaacataacaaaaacttagacatcgttttcttagtatgatatactaaaaaagaatttacactaatttactaagggggaatatcttatgtttaaaaaactttcagtactagctttagctatgattatttcattaagtattactgcatgtaattctaaagaaaacaaagctaatgatgaatctaatactaaagtgacaacagctgatgattcaaaagaaaaagagactctttttgtctattcaggggcaggtttaaagaaaccaatggatgaaatagcaaaaaaatttgagaaagaaaataatgtcaaagttgaatatagctatgcaggttctgcacagctaatagctcaaattgagacaagtcacaaaggagacgtatttattgttggttctgaaccaatttattcaaaggcctttgaaaaagaacttgtaggtgaacataaaacggttgcacatcatacacctgcaatagttgtacctaaaggaaatccagctaatattcaaaaattggaagacttaaataaagatggagttaaacttattttgggagacaaagagtctaatgctataggtaagactacacaaaaaatacttgaaaaaaataatttaaaatctataaatgataatgttgtctctacagctgcaactgtaaatgaaatgattgtacagttaacatcaagtaaagctgatgctacaatagccacaaaagattcggtctttggcaatgaagatgtagaagttatagaaattgcccaagataaaaatatagaccaactcatatcagcaggaatcgtaaactatagtgataaaaaagatttagctaataaatttataaattatatagagtcagatgaagctaaacagatatttaaaaaatatggttttgaacctgttaagtagtgattaaacttgaaaaataaattttttactacactacttactggattttttgctatagtctttttttttattgtatcaccacttcttatgttaatcattaaagggataagttatgttcctatatgcttaaaatccgtggaagtacagtatgcaataacacttagtattaaaacatctttaatatctactatagtatgccttttattagctattccagtagcatattttttacatattactaaattaccatttaaaaaactgattatacagataataaatctccctatgtctcttccacacttagtatcaggaattgctcttttacttttgtttggaagaatggggattggagattccatttataagatttttaagcttgattttatatttacaaagcaaggtatagttttagcacaagtatttgtaaatcttccacttactattaaaatacttcacacttcactaaatgaaagtaatgaaaagatgatatttgttgcacgtacccttggatgtaatagttgggaagcatttagatttataattcttccaaatctaaaaactggaatcatatctgcaactgtaatgacttggtcaagagcacttggtgaatttggtgcagtagctatgatagcaggttctacacgtatgaaaactgaaattattcctacatctatatatttaaatatgtctactggtgatatagacattgcaatcggaatagctgtaattttgatatttatctcacttacatgcttgatgctttttgagatattttttaatagagaggttgataagaattaatatgttaaaaataaaaaatttatctcttgatttacctaattttaaattacaagaaaatagtttaaatattaataatcatgaatactttgttttattaggagctagtgggtcaggtaaaactctattcctagaaacattagcaggaagatatccatctgctaaaggaaatgtatcatacaaagaaaatttaatatcaaacttacctccagaaaatagaaatataggatttgtatatcaaaattttgaattatttccaaatatgaatgttgaagataatataaggtttccacttaaattaagaaaaatacctatagatgaacagattcttaaggctaaccacttgtctaaattaatgcagatagaagatataaaaaataggtatcctaaaaatttaagtggaggcgaaaagcaacgagttgcttttgcacgtgccttaatagctgaacctgatatattacttttagatgaacctatgagttcattggattatattacaaaaaaacatataagcaaaattttgaaggatgtctacataaaatacaaaccaacagtgattcatgttactcatgatatttctgaagcaatgttttttgctcataagataggaataatgaacaatggaaaaataaatcatatttttgatttaaatgaagaaataaaaaataaaggagaatcttttttctatgaatatatttgatattttgagagattatctattagtacaagtcgataaatataatttaaatatggatatgataagtattgtgtccaaatctctatcttcaaaagaagcaattggaaatactaagcgtaaagatttcccaattatagttggtaaagaaataatgcttgaagctgactttaaaggagctaaaggacaagcatttacttctactccatctacatttgaaggttctttaaaagacatattatcattagatttacatgacaatcctcatgatagaagtctttttatagcatcattaaatgcagttatgaaatacttaggcaagacggatagaaccattcattgtaaaaataacgagccagaggtatgtgcaaaaaaattccctgagtttataaaaatggaatttggtaatccaaaagtagcaattataggatatcaaccagccataattgataatattaaggactttttcgaaacaagagtattagatttaaatcctgaatttgtggatactattcaatataatgttaagattgaagatggtatacgagattatgaagatgtaatatcttgggctgatttagtgatttgcacaggaagtacattatgtaataactcaattataaattttctatcacttaacaaaccagtttactattatggaactacgatagctggtgcatcaaatattttaggtttaaaaagactctgtttttgtagtaaataagcaatcatatcatcaaggagtacacaaatatatatgtgtactctttaaatttaaaaagttattacttttattctaagtactaaagtaaaattctattaaaatgaatcccgaataaatgtacaatccctttaaatctcaattcctatcaattattaatattttgattagtcttatacataaatgttttctttattttaaactaataaaaaaaattttattccattaatctactctatatttttcagcatttaagaaataatttttagtactttgtttgataatataactaagacaacttttcaggagatgattaaatgacatttaagaataaaaaatttactataaataaatatgaaattctatctattattctagttttatgcttgattttaaccggttttagtagctatgtgaattatagtcataaaaaatttaaagattatgttgtcttctatgttcagcatcaagatgatgaagtgttgtgggctgggagtgctattgttaatgctataaaagaaagaggaaaaaatcatgtatttgtagttttagtatctactggatgtggtatatccgtctttgataaatataaaaaatatgaaaacctaacaaatatacaaaaatcagaatatagaaatagagaatttttagcttctcttaatagccttggtgtaataagggaaaatataatattattaccagaaacaaatacaaatggtaatactgacttcaattacatggaaaaaattgctcttacatttgaagaaaaatttaaaaatgtaactcatatagcacatacttataagttagatgaccatttacaacatttaaaaaatggttctgttatccaaaatttatataatgttggtaaaataaaagatgctaaatattttgtaaaacctaaatttgctgataaaataacttttaataataagatagtttataaagctcattctactgaagactatgaaaaggttaaaaatgcctgtcaacaatacaaaattgttgatgaattagaatatagagaaggtattggctataagtctgaccataaatcatttgataagttattaaataataaagatgttcctgctatacttcatacacctaatttataagaaatatttattcttttaatttaagttataagaaggaaattatttgagattttgtgatatagcactttttgtgctatactactttttctcattcaactattacccatatctaatttcatcatctcttaaaatatataaagatatcatcattaaaacctataagccttattaaatactttatacatatctacattaaactacctatttatattaaactacattaaaataaatatttgttataaattcttaataattatgaaactcatttgttatttatatttgttaatatatgtttaaacctaaaaaattaataaacccaaaataacataaggagtgtgatagattaccctagatattttcataaacttttaccttcagattaatatgggcgtctatacttttaaatttactatatgcattgacaatatattaaaagtactagtttttatttcataatgaacgggcttactgttttctaatacctctttttggtataaaataaaaattggttaaaaataaaatttcaagggggttaataaattgaatcaaaatatattggttgtagatgatgatagagagatagttgatgctatagagttctatttgagacctgataactttaatgttttaaaggcatatgatggacttgaagcattggacatactaatcgaaaatgatattaagttaataataatggatgtaatgatgcccaatttagatgggcttaaaactacacttaaaataagagaaaaaaggaatataccaataattctcttatctgcaaaatcagaagatatggacaaaattataggtcttaatatgggtgctgatgactatataactaaaccatttaatccactagaacttactgctcgagtaaaatctcaacttagaaggtatataaatttaggtgattttagtaatacaaataactcaaatgatactaattatattctaaaaagtggtggcctagagctaaatacagatacaaaaatagtttctttagatggtgaggaaattaaaatgacaccacttgaatataaaatacttacacttcttatgtcacgaaaaggtaaaattttctcttcccgtgaaatttatgaaaatgtctggaatgaagatgcttatagttgtgagagaactattgctgttcatattagaagaattagagaaaaaattgaaattaatccaaaagaaccaaaatatttaaaggtggtgtggggcattggttacaaaattgaaaaacttaattattaatgattctaaagcaaaatttattttattattattactgtttctattagtttctatattatttgaagcagtttatgatttgaataataacttttcttataatattaattgttattataaagagtttgctctcccttatttttattttttcggtactcctgtacatttgtcaaaagtagaattagagtttgtctgcataggtattatattatcaagttttttattgactatactatgttttacattgtataaaaaaaataaacagactaaagtcaaattcttagagaatgtcataagccttttttctaaggtaaaaatagaacttacacttatattaactttgatactattaaccttaaggtttcatgcatttacaagtaataaaatgttttacaacactaatttaataatctacaattttataattatatctatagtctatataatatatgaaaatattaaatataataactataatctaaaagatatgtctataacatatgtattcttttcaaacttacttagtatgtataataaaaaaactataaataaaaaattagctatagtatttttaatatctatagttgtacaagctattatccaatatcttgttttgatattctttatgtatatatattattctgaggcaatagctatagtaattttatttacacttgtaaacacagtttttcatttttatatatacaactttttatctgttaagtttaattacataaataacatatcaaaaaatataaaaaatatagaaaatggcaatttaaagtataaattagaagttataggagatgatgaaatatctactttagccaaaagtataaataatataacaggtggtcttgaaactgctgtagatgctaatataaaaaatgaaaggatgaaggcagagcttatcacaaacgtatctcatgacttaaaaactccacttacatctatattaagctatgttgatatgttaaaaaataatgactttgacagagagactataaatgactatataaatattttagataaaaaatcacaaagattaaaattattaatagatgacatatttgaagcatctaagctaagtagtggagatgtagaatttaatataacaaaaaccgatataagagaacttttaattcaaagtattgtagagtttgaagacaaaattcaaaatagcagtttagattttataatagaaacacctgaatatgctgtttttaccatgatagatggtaaaaaaacttggagagtttttgagaatctaatttgcaatatactaaaatactctatgcctaacactagggtctatatagatatgtttataaaggaagaaaatataatattaacgtttaaaaatatttcaaatgataaactaaatctaaagccagaagagttaatagaaagatttagaaggggtgatatatctagaaaaacagatggctctggtcttggtttatcaattgctcaaaatataattgaattagaaaatgcacacatggaaataattatagatgctgatttatttaaggtaatgcttacttttagaagagttaattgatatattaatataaaaatatattttaagttatttaaacaagaaaaaaacctccttagaggtctttttctaaatgttggggtttatatttacatattttttgattatacctttttggtgtgatattaatacattttaaattatatttctctataattcatcacatatttcatctctctgtatctataatatcacatagtgtttccataatcagttacatctctgttacctaagattacaattttgtaatatttgtaatcttaggtacaaatttacatttgttctttaatataaatatattctttctatttaccctaaagaccttttaaatcatatttttctaagaaaagttttaacttagaataaatttgttctgctccaccaattttatttgattcaatatttaaagctagtaatggttcatgtagtgatattctaagtaaaaaccatccatctccatttgattcatcacaattaactcttattccttcaaaattatttggtgctacagaccatccatcaatactcttaacatgagaatctaaatcttttaatatatcctctgcatatggtctaaaatcttctttgttaatgcctattctaacttctttctcttcttgagcttcttcaaggttttctatcaattcttctatagtctttccttccaaggatagctttgctacttttattaaaattttagctattaaatatgccccatcatctaagaaataattttcttttaaagcagcatgtccagacgtttctatagctaaatggcactcttcaccttcactattcaatcttatagcttcatttattacatttttatatcctcttttaaatctatgatgtcttccttgtaattcatttataaatttagcaagtccttcagaagtaatcgaatctgttactatagctgtttttggatgttcttctaatactattgatgatataacagctataagagcatttttatttattggtttgccatttttacctacaatagcagctctgtctacatctgtatcaaagattattcctaggttgctattattatccaacacagctttacatatgctttccattgcttctttgttttcgggattaggtatatgatttgggaacataccatctgggttcaaaaactgactgcctgtcgtatctgctcccagtatgtgtaaaactttttcagcaaagaatccaccagctccatttcctgcatcaaccaatatcttaagcccagaaaaaggcttttcataatttttacttgaatttacaccttttctaattttatctatcaataaattagaataatcttctattaaattttttactataacttcaccttttttatttacttcctcatagtctacactatcatttttaacagctatatccaacatctcttttatattagttttttctaaacctccactttctgtgaaaaactttaaaccattatagtaataaggtaagtgacttgctgtaatcataatcgccccatcagaattgtatccatccataatagttgtcataaacatagctggagttgtagcaatctcacaatcaattacattacaatcatcattagttaaagtttcaataacagtacttctaaattggcttcctgttatcctagaatcagttcctatggcaacagttactttatctttcttagtcttttcttttagccaaatatgaaacgctttagctattttttttacttcttctacagttaggttaacttctttagaatcattttcatacgctattcctctaatatcagtaccattttgtagtttatataggtctcccataaaaaattctccttactcaaccaaaatttttattaaatattataaaatttcttgtttccacctaaatttttactattaaacagaaacatattataattttattacatggttactttatactttcttttagttcttctattttatctttatatgaaattggaggcttatcattaaataaagctgaagtaccaacaacatatatatctacttttttaccattcataagtttaatagtatccttatttatatttccatcaacctctataaatggaggattatcataatcttttagtatctctgtaagtttatccaacttatccaatacagaaagattaaacttttgacctgcaaaccctggatttactgtcattactaagataccctcaactaaacttatatattcttctattttatccacacttgtttgagggcttattgctaacactggccctataccataatttcttaacttttgtatatcagcttttacatttgtacttgattctacatgaaaagaaatatattttggctttatataagacatcatatcaatatatttatctggagtttctgtggctaagtgtatgtctaaaggtattgttgtattttcacttattgattttaataactctggtcccatagccaagtttttaacaaatattccatccataacatcacaatgaagtaattttacacctgcttcttcaagagcttctaattcctcttttaacttcatttggtctgcacacattattgaagcacaaataatagacataacgctcccccttgttataaattatatattatatatatttataaattttctttttctatatcatcaatcatttgtaatcttcttgcatgtctttctccattataacttgaatttaaccattcttcaacaattctcattgctaatcctttcccaataactctttctcctaaacaaagtacatttgtattattgtgttctctagttgccttagctgaaaaacagtcagaaacaacagctgctctgattcctttaaacttatttgctgcaatagacatgcctattcctgttccacaacaaagtatgcctaaatcagattttttactttgaacattttgacttaccttttttgcatatattggaaaatctacactttcttttgaatttgtacccacatcttcaacttctatacctttatttattaaattttcctttatatattcctttaattcataaccaccatggtcacatccaatagatattttcattaaatagcacctctttttataatttttttgattactttcagactattttataattatcataaaaataaagtattgtaaaaataaagctgtcccattgtagaaatttctttctatttttaagacagctttaattgacttatgtcaaatcaatttgttatttagatatatttatatctataacaactcttttatattttttactatatcttctgtagttaaaccatagtgttttaataaatcagctggtgtacctgattgaccaaatacatctttaacaccaattcttctaactactacatctttagtttctgctaaagcttcacatacagctgaacctaaaccacctattatactgtgctcctctgctgtaactacttttccagttttcttagcagtttcttttattaatgcttcatctaatggttttattgtagatatattaacaacttctacatttataccttctttagcaagttcttctgctgcttctaaggcttttgctaccattattcctgtagctattactgttatgtcagaaccttctcttaaaacagttccttttcctatttcaaatttataattttcactgtttacatcaggagttgcagctctacctaatcttatataaacaggtccattataatcaatagatgcaagaatagcttgtcttgcttctaaagcatctgctggatttaatacaaccatatttggtatacctctcattagagatatatcctctatagcttgatggctaccaccatcttcacctactgttacacctgcatgagtagctgctatttttacatttaaatttggatatgctacagagtttcttatttgctcatagcctcttcctgctgcaaatattgcaaaagtactcgcaaaaggtatttttccacaagtagcaagacctgctgctgtaccaatcatgtcaccttctgctatccccatgtcaaaaaatctatctggggcaacttctttaaatgatatactttttgtagcttttcctaaatctgcatctaatactactatatctttattttctgcaagttcttttaacacttgtccgtaagcttctctagttgctattcccattcctatagacctccttctaaatctttcaatgcttgctctgcttgttctgcatttggagctgttccatgccatgcagcattattttccataaatgaaacacctttaccttttactgttttagctattattacagttggttttcctgtaacttttttagcttcatcaactgcatttcctatttcttcaaaagaatgtccatttattactattacattccatccaaaagatttgaatttgtcatctactggatttacattcattacttcttcattagaaccatctatttgtaatccatttaagtcaacaaatgcaattaaattatctaatttgtaatgtgatgctgtcattgcagcttcccatatttgaccttcttggatttctccatcacctaatatagtatatactgtatagtctttgttatctaattttcctgcaagtgccataccatttgctgcagatagcccttgaccaagagaaccagtagacatatcgattcctgctacttttttcatgtctgggtgaccttgtaacttagaaccaaattttcttagtgttattaattcttcttctgggaaaaatcctttttctgctaatgtagcatataaagctggtgctgcatgaccttttgatagaacaaatctatctctatcagccatttttggattttctgcacatacgttcatcttatcaaaatataatactgtcaacatatcagctattgataatgaaccacctggatgtccgcttttagcttctgcaaccatttttattatgttttttctaatattattagaatgatctctaagagtgctcatactttcttcctcctgttattttttaagaccttacatttttttatcctacagtagattttacaattttttttaaaataatacaaatgtttttttaagattttactgctacttttatttcttccccgttcattaaagctgtaataccttctttaaattcgtctaaaccaacagttctagtaactaaagcttctgtatttactttcccacttgccattaaatctaatgctgtaatccaagaacttggcttttgagatctacttcctatatattgtaactctctttggattattgcttcttggtccatttcatttaattttttagcaaagattccaacttgtacgaaagtacctttttttctaagcagtcttaaggcttcgttaactgctggcataaacccagaacaatcaaatcctttgtttactccatttccatcagtcatttcattcactacatctgccaaactttcttccattacatttacagttctatctactccaagatttttagctatttctaatctttccttatcttttgtaacaccagacattataactgtagcaccttgagatttaacaacttgagctaataataaaccaattggccctggtcctattattaaaactgtatcagaactttctatagtagtcttttcaagagctgcatgaacacaacaagctagtggctctgtaagggctgctgataataaagatacattttcaggaagtacatgtatgctttcttctcttgatagtacatactcagcaaaacttccatttacttgagtaccaataccttttctagttgggcataagttataatctttagtttcacaatatatacatttctcacaagttgcaaaagtagtttctgatgtaactctatctcctacttttatatctttaacatcttctcctacttctacaacaattccagaaaattcatgacctaatgttactggggcttttatatttgcatattcacctttaaatgaatgtatatctgaaccacatataccactatattctacttttattttaaccttgtctcctgtagcttttggttcttctacttctaaaacttctacattatcatagcctggtttagttttaactactgctttcattatttttcaaccccttgtggtaaaattaatattttgttaaattcttcttttctatctcttatcatttcaaatgctttgtaagtatcttcaagtgagaatctatgagataccatttcttttaattttatctttccttcattaactagattgattcccttagtccattcttgtcctggaaatggtgcagaataagagttccaaaaaccttttaattctagttcttttctaaatatattttcaaatgcttcttctgataaagttatatctgaatatgctatccctaaaaatcctatcttacttttctttttagttataagtaaacattgttcttgagttatttttgaacctgcacattcaagagctatgtcaacgccttttccaccagtaagttcttttattttttctactgggtcaatatctttagcattgattattatatcagcccctaattcctttgattctcttaatttattatcagatatatcaactgctataattgttcctgctcctgctattttaagtccttgtattaccaactgccccattgttccactacccattacggctacagcgtctccaacttgaacacctatattaagtactccatgcatagcaactgctagtggctctatcattgcagcatcttcaaagtccatatctcctattggaagtacatttgtagcttttatatttacatactctgcaaaagctccaaaacttttagctcctaacattccatggtcatcacacaatgaaaataatcctcttttacaatattcacattcattacaaggtataaaaggaattgcaactactctatctccaacttttacattttttacatccttaccaacttcagcaattactccagaaaactcatgtcctggtatagctggaactggatatttccaatgttttaatactcttggaggatctgacccacatattcctgctgccataacttttatttttacttcatcactttcacatggttttatttctatatcttcaaatctcatatcatttgtgccatgtaatactgctgctttcacgataaatctcctcctcttgtattttgtatttttaaaaatttataaaaaatattactcttttttagtagctgctaaatgttaaattttcgcatactttactaaaaaagagtaatctctattaactacatattagaatattccaaatgaagaaactaattgagataatttcaatattccccattttagcaagtttccacctgtatctatacttgtaaccattgttgttccttctggcatcatatttgcttgttgtaataattgtgtatgaacatctgcaaagtttgtagccatataaagtgatatagctattactattgttcctgttataactgattgaactatattaccttttctaaagcacactataaatgccatataaaatggtattgtcgctaagtctccaaatggtaaaactttgtttcctggtagtataactgctaagaacaacgttataggaacaagtataagagctgttgatataactgctggatgtcccgttgctactgctgcatccagacctatataaagttctctgtctccatattttgcttgtaagaaatctcttattgattctgaaattggaattaaaccttccattaatattctaaccattctaggcataagtaacattactgcacccattgatatacctacattgaatattcctgctacatcatatcccgcaagtgctccaagtattatacctagtataatccccatcatcattggttctccaaatataccaaatcttttttgtatagagtctgggtctgcttgtattttatttattcctggtattttttcaacaaatttacctactaaatatccaagtggagcaaatgaagctgttgaaccagttggtaatgctataccttctaaatcataaaactcctgaacattttttgctgtcttttctgcaataaacagtactaataactccattagtattgcacagaatatagcccaaacataacttcctgttactatatatccaactgcacctgctactataaagtgccaataattccatatatcaacgtttaatatctttgttttattgaagtataataatagtaagtttactaataaacaaactggtattaatattggtgcaactggtgaagcccatgttgctgatgctgttgttggccaaccaacatctattactgttaaattaagtccgaatctttcaaccattccttgagccgctggccctagtgttgatgttaataggtttacaactaagtttatacccacaaatcctataccaattgtaagacctgactttaaagcttttgtaaacttaattctaaatatcattcctagtactacaattgttattggtagtattactgtcggtcccatatttaaaatgtattgtactactgctaataatttatccatttataaatcctcctttttctgttttataaaatattatttcaatgtatctatgataggattattttaaagcatctaatatttttttatctaatgctgctgtatttactccagttatatatgctgttgcttttattgctggtatattataagttgttggtagtatagttgttgatactattaaatctgctccttcttgctttgttgcacattcagctattttgcattgtataacttctgcttgtatattattttccttaactaatctctctaccttgtcacaaactactgttgatgttgctattcctgctccacatgctactaatatttttttcatttttatttcctcctaataatttttatttttatattttttatttttagtacttttttatttttataaagactttagtgtccttaaaacttcttctttatcagtagaactcatcaacttatcaactaactctttattttgcataattcccattaattctgttaatacagataattgactgtgtggttgattaagtcctaatatgaaagccaaatttacaggtactttttcatcttggtcttccatagaactaaatactactggttcattaaaagtacagactgatataaattgctctttaatatattctgcatctgtatgtggtattgctactccataatcacctaaatttaaacctgttggaaatacattttctcttgctaatattttttctccaaattcttcttttacaaagcctaaatcaaaaactttattatgtatttctttaaagaaatcttctttcgttttacaatccattttaaggtctataactttatcacttacaaaatttataaactccatatttacacctcctaattgcctttgtcttataccttagtttttcttgactttatataaagcatgttgcgtgccaaaaagtggctttttttgtgaaacaaaagaaaatgttttcccgaaaataatgctctcttccaggattttagctgactttcattgataaattttttttgatttttattttaatttttacttgttaatcacttaactagccatacttttttatattttttgtggttttttttgttagagaaatgatttttttgttttttacaaatggttttttatgtttaacaactattttataaaattatttattatgaatttaatttatttttatatattttttatatattctatattttataagaaatataggaaaaattttcatagaattgtccaataaaatttactttttacataaataaattcatatattttatttaccaagaaaaaagctaattctataaaatcatataaataaatttcatagaactagccttatatagagtaattaactacttagcaattgagtaattttaaattttatactaaagcaaatttttttgtctttcttctcggtactaataattagcttaaaagttcttttatttcatttttatcttcagtatttaataaaacttctaaagtatgctggtcattaatctttgaaaataagcttcgtatttctttcttattattttctttaagtgccagtagtaccaccaaatccaccataaatttattgtcccatactataggtttattcaaccttgcgattgctattgcaggctttataacgttttctggaagtccatgtggcacggctaccttagaggccattacaacacttcccattgcttctcttttatatacacttaatatatactttgaatcaacatatccaccttcttcaagttttgaaacaagagtatcaattatatactcctttgaaattccttcaaaattgtataaaatcaaatcttcatgtattaaattattcaactggttttcaatatttaaagctggttgtttactatttagatgctctaatactttattaataccatttttaccaagtacctcattataagaaataaaaggcacgtttttataatctatatcaatagttccacagatagcaataatattatattcagcttcaatatcatttaactcttcttctaaattattatttaaaaaagcaactggctttacttcaattaaagtgccatattccttaatttgtttttctatatgctcttttaaatttaaagctgtacctacaccactcaaacataaagtaatgattacatttttctttccatactcgttttttctgtaactaaatttatttgtatttatcatagcataattcttatttttctttaaatcagctattataccatctaaactttttccttcaatggttgcaagttttcctgcttccattgccaataatgtatctactctatttacagttttacatctaattccaagccttttttcaacctcatcaccaagaattaccaaagaacccatatcaattagaactagaataccttttctagcttctatcttttgaagctcttctaatacatgctctatcccctctgatggtgaatctgtaagtgctatttctatacctagtgtacattctatacctaaaatatgatttacaactttagacatttcaattccaactttaccatgcgtaactattactactttaactttatcttttatactttcctcattataacaaaatttatttatataataagccaaatatccaagctcatcttctggaaatgttacttgtgtcaaatcttctactatacccattatatatcttgacaactcatattccattggcattgatgcttttattttatctaaactcggatttattatagtttttccatcttttatcctacctatagcatgctcaatatgaattgctagagccaagtacagaccttgatttacatgcttaaactgctccttaataaatacaattaccttatccattatctccagtgtagactcttttaattgtcctccccagtctattcgacttcttctatcagataaatttttattgtttttaatagcattaaacttcttatctaacttttctataaatgcattttttaactcttcttctgaaaagcacttactttccaaaaccttaagctctttttctgcataattatatatctcgcttatctcattatcagataaaattctattttttccactcaccaattcactaatatctatatatatatcctcaactgaaaactcagaatacttttcatttttacaattacaatcataatatccactttttatataatcccttaaactatctaaatctataattaccttatcgctagaaaatatcgatttactaaaagctctagcacaagttacttgtatatcactctttaactgacctatatttccagtacacttataattcataagtgcacacataacttctttagttattataaaattcttgtttactcgctttgcttctctttcaaaaaactttattattatttcatatctttcagattttggtctttcactcatattaggtaaatttattaccattggtatacgtcttctaaatgtttgaagtaaattagaatctggattttctgttgtagcacttattatgagaacatttgcctttctattagaactactttctcctaaccttctaaattctcctctatctattaatgaaaataagatttcttgcccagcagcaggcaatctatgaatttcatctaaaaacaatattccattattagcttgttctacaagaccttctctatttgcatctgctcctgtatatgcaccttttactaccccaaagagttgagctatcaatagattaggattttctgcatagtctgcacagttaaacactataaatgggctgttctcttctttaatgttgttttttatagcatatttatacatacatgtagctaattcacttttacctactcctgtttctccatatattatagtatgaaggccattaggaggatacattattgctgacttagctagatttaccttttctttcaaacttccctttatacctatcaattcttcaaatccatcttcttctacaactttactcaccttcacatactttcctgatgatgctgggtctttatccttaatcccaatctttgactgatttaaattttcctcttttaataattttgaaactgcacttctcgatatattatatccattttctattaatatttcagttatttttctttcagacatttgaggattttcacttacaatttttgatatatcttttattaatattttttttcttctttctctcgaatctaaaatattattttttttcctaactgatatcacttcagacctagctacatttaacatttcagcaagttcttggtcagtatatggattttttttatcttctctttgtatctctcttaatattttatccatttttcgcctcctcacttaaaaaattaatctatttcaataatatgtttcaatatattatacaccaaaataagactaggcaaaatagcctagccttattacttagaatttccataataacctctttaatatacttataaagcgtagtttataattataattttaaaaaagcaccttcccaatccttcataaagctatctattcctttgtctgtcaaaggatgcttaatcatttggtttataactttaagaggaactgttgctatatctgctcccattctagcagcttgtaaaacatgtattggatttctaacactagcaactattatttgagcctcaatactatttacactaaatatatcaacgatttcttcaattaaatcaagaccattttgtgatatatcatccaatctaccaacaaaaggacttacatatgtagctccagctctagcagctaaaagagcttgtccagcagaaaatataagcgttacattagtctttatacctttacttgatagtactttcaccgcttttagaccttctgctgtcataggtatttttataactatatttttatgtatcttagataatttttctgcttcctctatcatacctttatgttctaaacttattacttctgcgcttattggcccatctactatttcacttatttctttaactacctctataaaatctctaccttctttagctattagagacggattagtagttacaccacatattacacctaaatcatttgcttcttttatttcttcaatattggctgtgtctataaaaaacctcataaaaaatcctccataattacatagttaaaatatgtgctaaacacaattatataatatcataaattacctaaattttacagttccattatctatagattcaactactgccaaagactctaatcttacatcattagcctttaaaagtgctcctccagcttgaaatcctttttcaatgacaattcctactccaactaagttagcttctgcttgctcaattaaatctttaagtccaagagcagctcttccatttgccaaaaaatcatccactatcaatatattttcgcctttgtttatgtactttttagaaactttaactgaatactctcttgccttagtaaatgaatatacattagtttcatatacatctttatccaaatttttagattctgatttttttgcaaatactacaggtgcattatcaaaatactgtgaaacaattgatgctatagctattcctgaagcctctattgtaaatatcttatccaccttttctcctttaaatctctctttaaattctcttcctatttcatttaaaaaagctacatcaatttgatggtttaaaaaactatcaacttttagtatatcatttcctgaaacactgccttctctcaatatcttttcttgtaaagccttcattgaacttccacctagccctttctaaaattatattaataaaaaaattatatttgttctaattttgctatctattcttgtaagtattttatattaaaatactaaaaaagctcctgtctatatcatagacaggagcttaaaattcaaagtaattaacttaatatataatttaaaataagtataaactatatcttcttcactcctgtagtcaagctattaatggtagcttagtagaaacatttgaaccatattatcaaacatatacaggtaaatatattaatttattccttttaattatatattataattctctattattcaacaaataattcaaactgtgtagaataatatattatagttactttatcagaactactttttttcaagtaaatttataaatttttcataaatatataacttttttcgatattatttaaaatttcttcgtcattgcttatattagctattttagcaacggctttttttaccccaatagactttatcaactcttgtaattctacactttgagtatcttcactattattataatgaagcgctgcacctattccaagaatcaaattgtcaactgataatccatatgattttgctgtcattaaaggtttaatcaatctatctttatcacttagttttcttaatggttcccttccgactcttaatacatcatcattaagatatggatttttaaatctatttaaaattttatcaatatatttatagtgcacttctgagtcaaaattgtattttttaatcaatccttctccactttctaccattgcacttttgactatatcacagataaatttatcttttatactctcttctatagtcttatatccttttaaatatcctatataagctgttatagcatgacctgtattcagtgtaaacaatttacgttctatataagccataaggttatcagctaaattcattccaactatagttggtatttcccctttaaatccttgtttttcaacattccactcataaaaattttcaactgttacatcaagaggattttcgtttttaccaggaggaactattctatcaactgaacagtttggaaaaccaacatacatctctaaatattctacttcttccttatttaaatacttaagtacctcttcttttaaagaagaacttgcgtatattgcattttcacatgctattatatttagattacttgttaatcccttttcttttctagcttttataccttttgcaattgtagaggctattttagtcaaaactaaaggtccaactgctgtagttattatttcagcctgtacaatctcatctattatttcttcttttatagatgaaaccgcacttatattatcaattacttcatctatacattctacatctcttatgtgtatagtatactttttatctttgtttattgagtttaatatctcctcatttacatcagcaaatactacatgataacccgacttaactaacaagcttccaataaaacctcttccaatatttcctgctccaaactgaatcgcctttttcattttaaatccctcctaagattagttggcaaaagcttccataaaagcttgtttgtcatttgaattttttagtctttctgttaagtcatcatctaaaactactgctatattagatagtatttctaaatgttcatctccaacaccagctattcctattaataaatatgctttttctccatcaaaatctataccattagggaattgtaatataactattccagaagataatatttctttttttgcttcatttacaccatgtggaatagcaactcccattcccatatatgtagtcattactttttctctttctaacattgctggtatatattcttcttttacatatccattttcaactaattttcttcctgctaaagttatagcttcttcctttgaaacactatctaaccctaaaaatatattattctcattcaatactttactcatagtatcaaccttcctttttaatattaattttatttatctataaatgcttttaatctgtttgtataaaaattaaaaactatatcttttacctctaatgtcatctcttctatagagaatttatttatcttattagtaaaaattatattgtctattaatgaaccacttatttcactcattatttgtctttgataacttggtgaatttttaggaagtaacataaaaactacattatcgatttcttcatttgaatctagcacgattctattctctagttttattattgataacttcataatatctattctttcactcatacaatgtaacaatagaatttttgattcttctatatatggaattgagatttttaatctttcttttaacgattcttttatagagattatatcttcactagattttgcaaatatttttgatgagtcttcaataagctcacttaaatctttactttcaaatttttcaaatctaatttcctctaaaaattgaagaatatcttttcctatattcatactttctgttatctgttcatatactttattcttacttttagtatcatttttcgcatttaaattgattaatttattttgagctatagattttattttttccttgattatctgttcatcatctaaactcataaatggacctacacatatataatttaaacttgtatttaactcaactgtagacactattaaatcaacatctttttcttttaaatactcttcatctatgtttatagctgatatggtttcaagtatatttaaattaggaaatttattttcaatcttagttgataagaatcttgaagtacctattccagtgggacatgccacaacaatatttatattagtattcatcataagatttttttctatggctgatgcaaagtgcattgcaatatatcctatttctgattcaggtattgaatttatatttagtttatcttttataattctagaaatcttttcaactccatcataggcatatgaatacttgctttttatttcatctaaaagaggatttcttatttctaatcccatattcaatctatttatagaaggccctaagtgatttgctaggtctttaaataacctctcgtcattttttaaacttattttaaattcatcttccgccaaatctatcatcttatttgtaatttccattatttctatatcatctaagtttaaagccttatggtttgaagatgacctttgctttgcacctcttatatgcatagttatatatccaacctcatctactggtatatccatgttaaaatctgtttccataccttttacgatttctttagctaatttaaactcttctgttatagataattcttttagaaactctttatccatagttatattttcaccattttttatcctctgtaaggctaatgaaatatgaactacaagccctatatatgcactatcagctaaatttacatctaaatctgaaagcttctttgttaatgtagcttcaacttttcttattatgcacctgtccattaaatttaaaagtctattttcacttaaaatttctattgctttatctgtttgtatattttcacttatatttctgaccatatctagtatttctttttcattgaatgaatcgtatataagatttacatatgcctctctaaagtttttttcttgaccttttaagtagacaccaagccctggttttctaacaagctcaatatcaaatctttccaaccatttacttgctaaggcaaaatcattattcagtaccccttcagatacctttaatatttttgcaaaataataggattttactggctcgttagaaactagtagctttgataatataattaaatttctttcttccttgctgtattctttttctattttttcttcttctaacaactcaattataaagttttgattttctatattttcctctaaaatcaatcccactcctggtttttttacaaagttaaaatcattttcatcaaaccatttttcaattccagacatatctctaagtacagttcttgaacttagctctaaagtccctgcaatctcagaaatagttattggaatgtttttctttgaattttctactatcattagtattatctttttttgcctagatgtaatcttcttttttttcaaattatccactcctaattagtggtactttttatttttatttagattctaatcttttaaataatgcatctaaatttgggtcatttaaaaaattgtttattgaaactatctcaacacttgaattattcttagcaactctttcaactaatgtattgtgagttactactatttgtgtatcatctggaagattatcaacagatgaatttgtaatttctatatttaagtctaagttttttattctatttttaaatctggaagctcccattgcactcgaacccattcctgcatcacatgcaaatacaatcttcttaatctcatttacttcaagctgtttttcctcaatatttttctcagagttcttacttgcagatttcatatcactcatttttgctttagcttcttctaaagaagtactgtcttcttcactttgatttgctgaagctctcttaacaaatggtgctgccactaagaatgatacaactgttgccactgcaactcctgctaatactggaagtaatcctccctttggagctagtgccataagtgcaaatatacttcctggtgatggtgctgctacaagcccagctcctaatattgaaaaagtcaatattcctgctgctccacctgccattgtagccaatattaaaactggattcattaaaatatatgggaagtaaatttcatggataccaccaaagaaatgtattattacagctcctggtgctgattgttttacacttcctctactaaacatccaatatgctaatagaactcctaaacctggtccagggttactttctagtaagaacattatagatttacctgcttcttttgcctcagctatacctataggccctaatataccatgatttattgcattgtttaagaataatacttttccaggttctataaatactgaaactagaggcaataaacttttgctaactataaattgaactccagattctataagagctgtccctgctactattgctggtccaattgcataaaatcctagtattgcaagaagcatacctattatacctattgaaaagttatttactaacatttcaaatcctgttggtatctttccatctacaaatttatcaaacttcttaattacccatcctgcaaatggtcccattatcattgctccgataaacattggtatatctgcaccaacaattactcccatagctgctgctgcacctattacgccacctctttgtcctgctattgctttaccaccagtataagctatcaatagtggtaaaaggtattttatcattgggtcgcctatagtactcaatttttcattaggcatccatcctgttggtataaataatgctgttataagaccccatgctataaaagctcctatatttggcattaccataccacttaaaaatttccctactcgctgtatagatgtctttattgtcgattgattagaactactcataattttacctcctcttgaattatattctatatcgatatgattcccttttgttatacttttattatagagtttatattttatagtaacaactttaagaaaccgtttctatgtcactttagataatgacatttgtcattttagtttttgtttaattttatttatgtagtattttggagtatatgattttgtaaataatactatttttataaaatatttaaatttaatagaaatgaaaataataattcagttaaataaatttattaaatgtacttttggatatactaatatagatttaatttatctgtatttttgaggtttatgcactctctagtaatattatcaatataaactatacaaatgtaattatatgaatcactaaagattaattttaaattagctactattaaacactaaacattatttaatatacaactttaccctataaggcaatatatattaaacaaatttaattaaaatagtttaaatttttcaaaaatctcaatatttgacaaaatactttaataaaattaaagaataagttataattaatactatcaattataaaaagtataaaaatataaggagtgattaaaaaatggcgttttattttgatacaccatcacatactttcagtgaataccttcttgtaccaggtttctcttctactgattgtatacctgctaatgtaagtttaaaaacacctgttactaaatttaaaaagggcgaggaagcagatatttatatgaatatacctttgacttctgctattatgcaatctgtttctgatgacaaaatggctattgcacttgctaaagaaggtggtatttcatttatatacggttctcaaactattgaaaatgaagctgctatggtagcacgtgttaaatcccacaaagctggttttgttgtaagtgattcaaatattaaacctgataacacattaaaagacatacttgacttaaaagaaaaaactggacattctacagtagctgttactgaagatggaacttcaactggtaaattattgggtattgttgcaagtcgtgattatcgtataagtcgtatggatttagatactaaagttagtgaatttatgactcctatgtcatctatagtttatgctaacaaagatgttactttaaaggaagcaaacaacattatatgggaccacaaacttaattctcttcctgtacttgatgataatggtaatcttatgtatatggtattccgtaaagattactcttctcataaagaaaatccacttgaacttttagattcttctaagagatatgtagttggagctggtattaatactagagactttgctgaacgtgttcctgctttagttgaagctggtgctgatgttttatgtatagattcttcagaaggtttttctgagtggcaaaaaataacacttgatttcattcgtgaaaaatatggtgatacagttaaggtaggagctggaaatgtagttgaccgcgagggattcctttacctagctgaagctggtgctgacttcgttaaagttggtattggtggtggttctatatgtataactcgtgaacaaaaaggtataggacgtggacaagctacttctataattgaagttgctcaagctagagacgaatactttgaaaaaacaggtatttatattccaatttgctctgatggtggtatcgtttatgaccatcatataactttagctttagctatgggtgcagattttataatgcttggtagatacttctctcgttttgatgagagtccaactaacaaagttaatataaatggtagttatatgaaagagtattggggagaaggttctgctcgtgctagaaactggcaaagatatgaccttggtggagataagaaactttcttttgaagaaggtgttgactcttatgtgccttatgctggttctttgaaagacaatgtaactctttctttaagtaaagttcgttctactatgtgtaactgtggagcacttagcattcctgaacttcaaaaaaatgctaaacttacacttgtatcttctactagtatagttgaaggtggagctcatgatgttatgttaaaagataatagaaatttataatataaatatactttaatcatttaaacaatgaaaaagagacttatctctattttgagacagtctctttttatattagtataatttttatttaactgtaaattcaagaagcttacttttaagttcattttctatttttgataattcaacttctgcttcttgtctctttattctaccatcatgttgtattttaactacctcatcaatagtagatattagagattgattagttttcttaattgtgtctatatctacaattcctctttctgattcttttgctgtttctattgttcccatcttcaaagtttctgcattcttcaataaaagctcatttgtcatattactaacttcacgctgtgctttcatagcttgatttaagtgagaaattccaagagcaagcactatttgatttttccataatggaatggtatttactatagttgattgaatcttttctgccatcagattattactattttgaaccaatcttatctgaggagccatttgaagcgataccattctagttaattctaagtcatgaattttcttttcaaatctgtcacaaagtgaaaccatatcatttacagattgagcatcttctgttgaaccagataaacgagctttttctctcaactttggcatttcatattctttcatatcctttaatttttgttttcctgctataatatacatagtaagctcttttgagtaagctaagttcaattcatacatcttatcaagcattgctatatctttcaatattttaacctgatgcttttgaagctctttacttactttatccacatttacctctgcactatcatacttagtttttaaatttgaaattttattatttgcctttttaaaaattcctaaaaaaccactttgttctttttcatctgctgaaaatgcttttaaatcagtaactagatttgtaagcatatctccaacttctcctaaatctcttgtttttacactctttaaagctgtttcagaaaaacttgctacctttttttgagcaccagctccatattgcaaaatcatatttgtatttgtaatatctattttttccgcaaattcctttaccatcttgcgttcagattcagacagtttttcttcttctgggtctttttcatcctttttcattaataagtcagaattatctatatcattagtgtttgattcttctccaaatgggtcaagtgtcaaagttggcataactggtatatcatctaaattattcattgtatctttctctcctcttccttcataaagtactgattaacttatataatacacattttatactttatgactaattaattgtttaaaaataacagaatattttttctattgaagttaaaatttaccactcgttaatccttcttggactaacatattctctaaaacagtaatatctgtagaaatatcaatggcttcatcttcaaacagatagtccaattgattttcaaaagctactacaatcgtattcattgtattttcaatactttccatagttgttgttatattttctctatcaattccttgttcttccaatgtatgatatgaatttaatagttttaaagtggttggaagataataatccataaatttttgtatttgagtaagttttgatgggtcatgttttacaacatcaaatattttacttgtaacatcttctacttgtacaattttatcgcccattgattctgatttaatatttttattagcttcttttatttgtgttagataattcattcctttatttataattgtatcaacttcattggattcatcagtcttttcttcttctttgacttcatatgctacatcttcatatcttggtggaataaaatcttcatttgttaacacaatctgattatttcttttatcaatataagtatttataaagtagtttttgtctatcatcttttgtacatcttttattataaaatttaatgatttagatgtgttttctgcaataagttctactggaataatatttctattgtttataattgtacaatattttttataacgagaaatttggtctcctaatctcttacctttaaaaatacaaactcctcctataagtaaaaatactgcacatacttgaataggaagtattacagcccatccaattataatggaaatagttgaaagtactaaggctgataatgtaaataagcttaccaaaccccatccaattatttttaaaaatttacttaaaaatgaatttattaatacagatttttttgaaaaattttctgatttatacatattttataatcctttcattttcactaatattattaatatattgcagtttgattatacaattacttacttattactgtcaaggaatttgaaattctacaaattgtttcaaataaagtaatagacttaaatataagcatattttaaattaaaaatatacttatatttaactccatataaaaataagagaacttaactttaattaaaatttaagttcccttatttttatttgtacataaatataattagcattgtttatgttgactatacatataaataaaaaattgtattaataaagatttgcaaatatctctcttatttcctctctactaagctctacataattattagcaagtagtcgttgttgatttgctattgtactatctgtaaattcatctatctgactttccaccattccatattctctcaaagcttttttagctattaatttatttaaaaacttttctaattctccataaacatcacagttagggtcacattcaagggcatctgctaaaatttttgtacattttataatttttccattaggtttttttctagaatacatcttaaatacttcagtaaagaactgataatttgcttcaccatgtgcaacatggaaagctccacctattgaataagatagtgcatgaactgctgcacaaccagcatttccaaaagcaattcctgcataatttgatgcaagtacaaagtctctaagatgattaaatctctcttcttctcctttatcaactatcttcttatacccatccataatcatttttattgcttgtagagaatacatctctgtaaatggacttgcttttggagaaagataagactcaatagcatgtataagagcatctaccgaacttgtaacaaagaatttgtaaggtaacccttttactgtctctggaattaacactgcatagtctgcatatgtttcttctactgcaagcccctttttagtatgtttagattttaactctgcaatagctacatttgttacttcactacctgtaccacatgttgtaggaactactactaactcttttacttttttaggtgatacttctccttcaaataaatcaatagacttttctggaacatcaagtgctaatatcttacatatatcaactattgttcctcctccaaacgcaataattctatcaaaattgtatttcttcatttcctttgtcatggagtctatcatttcatcagatggttcacctgttccaaacttttcttgaaaaattaaatttgtatctattccaagaggtttcatatatggctcatatataaactcattagtaattactaaatcattttttcctattttaaattcttcattaaattctttaaatgtatcaaaataaaatatctttggaactactctaagtgcttccattattaacacccctctattattaatatttctccttaaatctcttttcaaattctactgctagactttctcttacacttggatgagctatatttattaaatttcttgctctttctctaagagattttccttttaattctgctataccgtattctgttacaatatagtcaacatcatttcttgatgtcgttataggtgcaccttcatccacaatagatacgatttttgaaattactgtaccatctttttttgtagttattgaaggcatagctataattgcctttccatcttcccccatagacactccacgtataaagtcaacttgacctccaacaccactaaattgtctaagtcccatagcctctgcaactacctgtcccattaaatcaacttgtatagcagaatttatagaaaccatcttatgttgtttcattataattgctggatgattcacatagtctactggttttacctctactgcagggttattatttgcaaagtcatataattttttagtacccattaagaaggtaactgtcattttttctttatcaaaatttttatatttaccatttataacacctttttcataaagggccaaagtcccatctgaaatcatttctgaatgaatccctaaatcctttttatcagttaaaaataacataactgcatctggtatcccaccaatacctagctgtaaagtagaaccatcttcaattaatgaagcacaatttttaccaattgcttcttctacttctccaatctttgcaggttgtagttcaaataaaggttgtgatttttccactatatagtcaaactctgatacatggactacctcaccataggttctaggaaactggtcattcacttgaacaattactgttctagcagttttaatggcttcataagtataatcaactgatgttcctaagctacaatacccatgttcatctggtggagttacctgtgctaaaacaacatcacattttaatcttttttctctaagcaactttggtacttcatggaagaatgcaggtgtaaaatcaccatctccattttcaattgcctttcttacatttccacttacaaacattggatttactctaaaatgagcttccattcccttagcagtatatccaccactacccaagcttaccatatgtttaatctcaacatctttatattgttcagcattttcaatcatagcctctactagtgcaggaggttcacctacacaatgtgcaaatactacagtatcaccgtttttaatctgttttacagcttctgtagcactacataatttactttgatacaattcttgccaactcaatgaaatccccccatttagcttttttaagtttcacaaattgctgattcaatcacatttataactctttctatatggctaaaatcccacatcttaacacattcatttttcactttatattgttgataggatgcgcatagagttgcgcatcctccaattataagtagcaaatcatactcgacgttctcttgtgctatgctaaaatctaccctaccattgaagtgctctttgattattgtaagagccttccctctttcgtatctagggttacagcccccacaaaatctaactccacaggtcatgtgtaaattctccttattaaaaatttctttacttagctaaaaaccaccataattttataactatctcttatactacatatcttttcattaattaatacacattaatatataatttccctttatatatcaactttttataaatttaaagcttcctctttttttattcccgcaattttcttagctaattctttcttttgatttatgtttccttgtcttgaaatcattattctttgagcttgtggtgaacctgccccatgcattgactcagttctataaccaacagcagatgaaccaagacatatattttctaagaatcttaatattctcattctttcttctgttgaagccactgaagaagctttaaaatacttgttacatacttcgccaatagtcattccacttgttccaactttaaggtctgatttaaagtctttttctgaaggcatagtaaccataagccctccagctatatcttctgcaagtcttactatttcataaggaaatctagttacattttgtttacacacatttgcaagaagtaaatctatttgatagtttccagcttctgttttgtgaccttctgatgaacatgctataccacagcaatataagctttcattaaggtgagtcatttctattagtttatcttttatatgtgaagctttgtttgctccattataatcagctgctaaagctgctgctcctattattacatcacctactcctactttacatccaccataactttgtctatggtatcctgcaaatctctctactaacataccagagaaatcccattctccacataagaaaattctatcatttggaacaaatacattatcaaatactactaaagcttcttgacctccaaactccttatttcctaaatcaacatctgcaccttcttctaattttctggtgtcacaagattgtcttccataaatcataaacacaccttcagcatctgaaggaactgcaaatgatacagcgtagtctttatctgcttcagtcatacttatagtaggcattataaggtgctcatgtgaatttattgaaccagtttgatgtgcctttgctcctcttacaattatcccatcttctcttctttctactatatgaaggaacatatctgggtcaggttgagcactaggtgatagacttctatctcccttagggtcagtcatagctccatcaactactaaatcgttttcttgtatataagttaagtattttacaaaattatcatgataattagttccatgggctttatcacactcaaatgttgttgaatacactgcattaaacgcatccataccaacacatctttggaaacaagaagctgttttttgaccacatagtctttgcatttttactttttttatcaaatcatcaacactttgatgaagatgaccaaatctatttattttttcacctgtgatatttgaagtaactgtcattaaatctgcatattctgggtcatgagctaagtcataagttgctgctacacaatttatagatggtctaatcataggatggtcaacccaattcttaacctcttcaccaaacatataaaccttagtatttaattttctcaaactttcaatatattgagctcctgtcattaatgccataataaaaccactccttctcttttatagatttttttatttattttaaattataatacttccttcttctatatgtctcttaatattttaaatttagtccaataaactaatttaaatttaatttatgtcttaaattcattctaaattaaaatatattcctactttaatttagaatgaatattttttgtctaagttttatccccaaagttcttcatctgtagggacttcattttctggcatataataagcaattctagaaatattaattagatgcttataatcaagattttcagagatgctgttatttccccaagaaccacaacctagagtattagtaggtgcaagaccattaaagaaacttcctccagcactagtagcacaacattgattaataacaaatcttgatacttctatattttctcctgcatattctatatttttaactgtatttgaatgtatagatacactatgtccttttccttctacatttaaatttgcttttgcaatagctacaccttcttcaaaacttttatacttgtatgcagatataactggacacattttttcttttgcaataatatcctcttctcctggtccatcagcttctattactattatttttgtatcttctggtatctcaacacctgcaatttttgcaattgtatgaactgattgacctactgcatctttattcatagatttatttacaaacatagcatttctgaaagcttctttttgtactttatctctaactataaaacctttgttatttttaaattcatccattattttatcaaacatttcttctgctactattactgactgttcacctgaacaaatgataccattatcaaaaattcttcctgctatgattttaggtactgcttctttaatgtctacatctctatctatgatacattgaacatttcctgcccctacaccaagtgctggttttccacttgagtacgcagcttttaccattcccattcctccagtggcaattactacatctgctgatgaaattaaatttcttgtattttctcttgattgttggtcaagtatttgtattaaattttctggagctcctattttttctaattcttcattaatcatctctacagtttttgtactacatccaattgctttatgatgaggtgtgataataattgcatttcttcccttaagtgcaaacattgcattgctcataggtgtaacgattggatttgtacaaggagttattgccgctactactccaactggtttagctacctttgttattccagtttctctatctatatcaattataccaactgattttttatcttttaaattgttatatataacttttgctttgcttttatttttagctaccttatcttcatatactcccattccagtctcttctacagcaagtttagctaaatattcagcattataatacactacttttccaactatttttactattttatctacttgttcttgagtataacattcaaactctctttgagcttttcttgctctctcaatataaccattaatgtattccttacttaaatcttcaaagttttccactgctttttccatttaaaatctacctccaatttattaaatattttataatgcacttttaaaagtttcagcctttttcattgtacctgtactcataaatttactatgccatgataaagcttcgtccaatatgtgaggtgtttgttttgctccacttttacaagctctatttaaataatccctaagttgttctttataatctggatgggcacaattttctattatttttatagctctttctctaggtgcaagacctcttaaatcagcatatccttgttctgttacaattaccattacatcatgttcagtgtggtctacgtgagataccataggtactattgatgatatatcaccattttttgcaatcgactcagtactaaatatagttattgctccatttctagcaaaatcaccagaacctccaattccattcatcatctttgaccccattatgtgagtagaatttacatttccataaatatcaacttcaattgcagtgttcattgcaattacaccaattcttctggctatttctggattgttactaatttcttgaggtcttaatataatcttatccttaaaaaaatcaatatctttttcaaattttattaatccttctggagatggacttacagatgtagtagatgccattgtaactttacccattcttattaaatccaacatagagtcctgtacaacctctgtataacaagttaaattttcaaattcagattcacataatccatataatactgcatttgctacacttcctacaccagattgaagaggaagtaaattctttgataatctgcctgcctttacttcttctcttaaaaaagcaataatattatttgatatttttttcgaagcttcatctacaacccccaatggacgggtcttatcttgcatattggtaattactactcctgcaattttatccaaaccacaaggtatatatgttgttccaattctatccttaggatgatttatttctattggttttctatttggtggattttccgtaatatatatatctgccataccttccatttccattggttttgcaagatttatctctactattactttatctgcactttttataaaagatggagaattacctatcccactagttggtataatattcccttcttcagttattgcaagtgcttctactatagctacatctactttaggtatagttccataatttaaaaattgagtagaatgacttaggtgcatatctatataatcaacaacacctttattaatattatttctaagtattgaattagtttgataaggaagtcttctttcaattatacctgcttctgaccatgctccatcaacttctgggcctaaagatgctcctgaatatacggttaattttatcttttctccacttttagctctttctgaaactgctaatggtactgcttttggatagcctgaaggtgtaaatccactaactccaataaccatgccatcctctataattttagcagcttcatctgcattcattattaaatcacacaattctttatttcttaatcttccacttaattcttcaaatgctccttcattattcataaatatccccccatataaaatcttatttacattggaagtttgtgtaaaactataaccaatataactttagttaataatgcaaatggatacgtagcaccataacctgctgctgggtcatcactatcaagagcatcaacagcagctccaagacctggtgttgatgtcataccaccacagacagctccagataataaaatccaatttaatttaaatacgtatttgccaactaagaatcctatcatcatagctgtaacacctactgctattgctactaaggctaggtgcataccagatgtcataattgaatcaactacttttccaccatatcttaatccaactattgctaagaaaaatactagccctatttgttttaaaatatttaaaaccttttcttccattctgaaatttactacccctatcttacctatatatccaagaactagagatacaattagtgaacctcctgttgcgcctagtgtgaagtaccctagtggtcccataaatacatgtattcctccaactaagtatccagctaaacatgtcaagaaaaatgttattatattaaatggaacttctggtatcgttttaccagaaacactatctcttgcttccttcatttccttctcatattttcttctttcttcttttaggtccatcctaaataattttggaaggaaatttacacctaagattactattaaaactccaaaaggatatgcgactgcatgacctataccaacaccagcttcagcatatgcaatatacttatctatttgctcttgagtcagtgatgtagttgtattcacatccaatttgccttctgggtcgactacttttaaaatttcttttttatcttttattgaagctttttcaaattcttttgatacatcttctgcatgtttaccagctgtttctaaagcagcagctaatccaggcgaacttgttaatgctcctgtgtaaacgccagaaacttcataagcactacttcctttatcacttgatagtaaagtcattgcataagtcatagagccacctataaaagttataagaactcctaaaattacaaatcttgctccatacttctttaatacagctttcatatcttttgctgccaatagaccaactgctgcaacaaatattattaaaaagaaatcaaagaagtcagaagaaataattccattccccatcattacagttgctgccttatatcctgctgctgtttctccttttgctattattagattccccaagctatatgcaagccatccaataaataatcctgtaaataatgctcctgataccccaaaattaaacttcccaaatttaatttttccaaataaaattcctgtaattactgcagcaaacataaggacaaaaggattcattaaaaaatccatcaattcaaacttcactaaatcactccctttcatttttcgttattaaattaacaaatattattaaaaaatatatttctcctttctccccaatactctattttgttattaaattaacatttctgattaaaaaaattttatcttgttaatatcacttttttctttatgatttaattaacaatttaattgtaaaaataatttttattttctaatagataattttttgatattcgttgatataactgtaatatagattgatttactctaaaccataccagctattctcttttgttaatttaataatagcactattcttaatagattgaaaatatcaaaaacttatgctatgatagtttaaaactattctatttttttacaacaatatacaaaacttatgctattgttaattatatacttgtcactaatatgtaaatgaaaggaactaataccaaatgaatataaactatttatactattttcaaactgtctgtaaatataaaaacatgactaaggctgcagaaagtattcatatttctcaaccatccataacattagcaattaaagaattagaaaaagaacttggctttgaacttttttacagaataggtaataaaatagaattaacgcctgaaggaaaaatttttttagacaagtcaaaacattttataaaacaatttgaggattttcaatgtgacgcacttgatttaggaaaaaagagaaaagcttctctcaaaataggtattcctacagttttaggtacgtttttgctttcaaaaatacttcctagatttaatgtaatttatccagatatagagcttaaaatttttgaagttccaacatttgttggagctaaaatgattgaagaatctacacttgatttttgtattggtataattgacagtgatatttatgatgatatagattcaaagacaatctataaaacagaattgtacttagttacaaatcccaaaaatgaattggcaaaacatcccattatatcaaattatatgttaaaaaatgtaccttttgtaatcttatctgaaggttcttatcactataagattattacaaaaagacttgaaaaagctaagccaaatataattttacactcaaatcaactttctaccatacgttatttactagaaaatgacttggcttcaacaatattgtataaagaaatatttcaaaatacagaaaatctctgttcaataccattagaacgtgcaattactgcaaatattggagttctttggagaagaaatcaatacatatctcatagtatgaaactttttattgagtatatggcatctattcatataaactaaatttatattatacagatataatattttgtttaaatacaatgttaaaatattttaataaatagtatagtttagagtatcagtataaaaatacaatatagaatgttatagaattataattgtatacatttaaatctaaatattattatactgatactttttaaaataccttttattgataatacttttttaatcaggtttacttggacaacctagcaaaaaacccacgcatcctgagacaaaatctctcatctgtgaaatagtacctaaagaagctgatgttgtagttgtaaaatttcttacaacaaaaagtactgttaatgctgctatacaaattacagtagctataataatttgcaattcactagtttctccttcttcaaaaccttcattattattaataggtattttcttttcataattatcagcttctgaagtaaatccaatggtatttttgacattcattatattattttgactagactcttgaccttttgggggtaaattattatctataaaaagatttgaagatacatcagtatttgtatacttccttaaaggtctctttataaaattagcacttaaaaaatacccaaatatagctgctgaagtggttcttactactacatcaatagttgtagtatcttgtgaatttacttcattaacaaataaattatatatagattgaaacattaatattgccattacaattataaggcatctatcaattaatttgattttataccaggctttttttatattttttataaatttatgttttttatacatatatactatcacctcttacaataaaattaagccctctttactataatatgtaaatagagcttaatagtgagattatgttatattttatgtaaaaaaatatatataaattaaattatttgtctaaaatcatcaaatctttagggaatttagtaagtctttctggaccatttttagtaatcaaaacagtatcttctattctaactccaccccatccagggaaataaatacctggttccattgttattatacatccctcttctatgattttatcaccataattaccaatgaaaggttcttcatgaacatccctaccgactccatgtcctataccttgatagtaatagtcttcatattttttgacaacttttcttatctcagcatctggaattgtcgcatgtacaccagctttcatgttctcaacccctacattttgagcttccttaactaaattatatatttctaattgcttttcagaagctcctccaactataaaagttctagttgtatcagatatatagccattatacatagcaccatagtctataagtacaaaatcacctttttctataatcttatcactaggcttaccatgaagcaatgaagtctttgctcctgatatcagtatagtttcaaaccctatattttgtgctccgttcattttcataaagtactctaactttgtagccagttcaatttcgctaactccagcttttatatgtggaatcaattcttctaatgccttatccgctatttcacaagcttttcttgtatttttgatttcatctttgtcttttacatatctcaaagtctctacaatattttctgtaggtattaattctccattatccttctcaatcagatttttaagttcttcatatttatcaaacactatattagttctttcaaacccaagtttctttatacccactttatcacatacacttttaactgcctttgccacacttctatcaaaattatgccaatttataatttcaaaatctttgcaaaccttttctgcaagctccatatatctactatcagtaactaaaaagtttccatctttgcaaatcactgcatatgcttcttcatcaggaaaaccacttatatagtttacattagttttctttgttagatatagtgcatcaacacctttagttcccaacaatcctactacattttttactctgctcatgattttacctccaaataataaattttatcttaattatattatatcactaattaatcttatttttatctaacagatactttattcctaaaattttttcatattttattaatttcattttaatacttcattagtttttatttagttagaaagcttaattttaattgaataaatataataaattagctagagaatcaaataaatggattgtgttaatatataaatattgacaagatataaaataaaaagaacatataattataatcaataaaattataactatatgttcttatttacatataaaaaatgtacttattttgcagtatatccagctttaactaaagtttcaactgctaagtctcctttagcttcatttactaaaactattggacctgtacaacccataccactttcagcatagattccgtttttccataactcagatactgcatcttctaaatccattatatcaacaccagctatttgacgagtaacaatttctttatctggcattttaacttctactttttcagctttaacttcttttttagtaagagaggatataatgtcatcaaattttgcttttttaacctttgcaaattcatttcttgcaacattacttatatctccctttacaacatcataagcgtattttaaagcatttgctactaccggagaacctgatgctcttgatactataagtacctttctatcatagtcttctccaactccaggtccgtatccaaagccttgagcttcataatctccacctgtagtatatgaagaaaatactttcataaatatatttccagataatgtatcagtaaccataacatcaggtgcacctacaagtaaatcattacctctcattacacatccaccatctgctctaattgaatccgcaaactccatgtcatatccattatcttttaattcttttaagcacttctcaacttgtcttgctccatcaacattaagtattccaacttttgggcatttgttacccattgatttagctgtagcaataccataaatggcatttcttaccattgcctctattctattagtagcacttgttcctgttgttgttgcaagtatcatttcttttccttttgctggagttattactctacctactgtagatacacctattggaaaattataatgcatagtaacacaagcatcaatatatcctgaatctaataattcttccatttttgcatgcatttctttttcatcattaacttcaactacttcaaggtcagtttccacttttggtccaataagcacaatatcaaataaattagattttgctaattgtgcaccattaaccatgttttctacaccatgttcacttccaagtgtagtaacaccaatttttacttttttgccaaattcgccgctttctattgcattagctacttctaagaatacatctgcgattactttttttgacatatcctcacccctattcttctaacatatctaatgctagttttttcatagattcagctattatcttcttaatttcatccttagatattcctgaagtctcttcagtaacacctgtatttctttcagctataaaagatactccatcaaataagttagtcattcttcctaagaataaactaccttttccaactatcatagctctatttctatttcctgtagttaaatcatctattaaaaatcctatataaggagctcctgatggtatatgtccttgagttggtgcccatcctggtaatcctttgttagaaacaaaatctttcaattctttcttttctaagtctccacgtttaacagcaagtgcccctatcattttgtagtttgcttctggaacatctcctgctcctgctggcttagttatatctgggttttgcatttcaactgaatacacatcaacatctgttatttttaaattagctctatcaagacctgaagttataagtgctgtcataactgcttgtggtgaagaaccagttccaacagtatgcttacctgttaaatcagttcttataactggatttacaccatcattttcagatacaagtactgcaaatcctccaacaacatcttcaagtacaggaagaccttttttaacatggtctttagcattcattccaagtttagcacttgctccacctgctactaccattacatttttatgtatgccagcttttactaaagctgctgcttgaattaatgcatgagttggtgctgcacaaaatcctcttgtgtcagaaccagttgcattctgaagtcctgctatctcagctattgatttagcaaagtttcctccacctctttggtttatatctccacaagcttcttctgaacactcaataacataatctatttcagcagggtctattttgctatgtcttagcatttgaatagcagataaaactccagatgcttttactactagattttcaaacattgtatgggcatttaagttaacatctacatcatgtgctctttttacataaccaacaaattttccatcatggtataatccttcagctatgtgtgttgctactaattctttaccttcttctatatcatcaccctttaatttacctacaaatggtgcaatttcagggtagttattttcgatttttggctttacttcatcaataaattcttgtgataattttactaaatcaaatgcatcacttatttgcattaaagctatgaactcatcttgaggcattatttctccaaacttaccatttctagttccctcaatcttttgttcacaccatggcattggtaaatctcttaattcttctggtcttctatttcctatataaacttgatttggcatgtagttaactacatcttcataacttcttatatgattacttacttcttttaaaaattctgaatctgaatttgttgctctttcaactgtacaagtacttccattttgcactatcatatctggagtatgaataagtacatagcctgccccttttaaaactggataagtcattttgtgcacctccataaattttatgaacacttattttttaatcttattaaacttattaaaagctctaatcattgtattttattgtatatttgattctattattgtttatgtattttggcattttttaagatttcatgaatgaataactccaatttatccattcatgaaatctatattattttttttgtgtatagttattttttatttttagtgtgtgtttatatttttatctatataatatatgtgtgtgttatttttatttttcaaatactgtttgaccatctacttctgtagttaaagcatttaatgctttttctacaaggcctcttcttagggctttttcttctgtagggtcaagcgctggatttccaagtggatgaggtattgctatagttggaactattctattagcccctactgttaatgaaataggtactactgtacacatatgaactactggaagtccagttttttctatttcttttaccatcgttgcaccgcaacgagtacaagtacctcatgtagaagttaatattactgcatctacaccatcagccactaatgctgctccaatttcagaagcatattttttagagtttgcaacagatgtaccattacctacagttgtatagaaagtctcatgtaattttccaattacaccttctttttctaaatctctaagaacatcaacaggtaatactctatctgcatctaaatttgcatacactgggtcatatccaccatgtgcagtttcataagtctcttctgttaaatccataactcctgctatagaataagttccatatttagaagctgaagaagactctattctatctggatttccttttggaactataccaccagaagtaactaaagctattttacattttgataaatcttttacagctttacttgggtcaactctatcaaagtttggcattgggtattcagtttcaaatggttcaccttttattttcttaactaacatgtcaacagctctcttagaacctctgtcttcatggaagtagttaactcttattcctctagctatgtatccttcatctttaggagttccaatttcttctccattagcaagttttactgcaagtttagctatcttaggaagtgcctttctcatacctgctgcagaatcagaagtttctactacataaacatcctttttgaacatatctgctcctggattttcaacatacatacctgttaaagctggtatattcaaagcatcttttacaactttagttattgttccagcagcaaccccatatctaccagcattaaatgcaggaccagctatgaaaagttgtggttcaaaaccttttaccattgataaaacttcttcacttgcactatcaatattttcattgaaatagctatctccacaaactactgttccaactatttcaatatcttcacctaataatttatcaagttgtaaacttattggaggtaaagtttctgccacatgtggcttagtatcagctttttcttctccacctataccagcaaagaactgattaatataatgtactgcttttagttttcccatctcttagtttcaccccttttgcttttaggcattaaaatttacaaaattcttctcttataccagacatttcttcttctatttcttcaacttctaaaaccatttccatcatacttatttggtcttcatatacactttcatcaaataatgattttattggttcctcaacaacgtggtaaacacttaatcctaaggcaactccagcaagtggtccagcgaaagttggatctccagcagttactgtttcggctgcaagacctgcagcttcggcttcagcagcacctagtaaaatcacaacattttcagctccgaatttatcagcagcatctttaactctgttttgattttctaagtccatagccccagcagctgttcagacaaagcattctgtagatgagaaaacaacctctgctccttctactgtttttacacattcttctatcgcaggtcctggtataccatcacggtcacctattataagaacctttttattactaagtaaactcataataatcctccttattatatttctaatatatttttatatatctataacacttattataattatctataatatgttttattaacattactcaatcgtttaataaaatacttcttaatatcctttagcagttaaatgaccaaatcctgtttcattagttgcacctgttatagcttggatttcaacttcaatagttccatcagctcttaaacttccatcagaaccaccagctattacatctactacttctaaatgtccaataactttatctaacttaggaagaactacaacttggttggcatttccacctgttacaacagcatcagctcttacatctgcatctgcaagtgattgagaacctccatcacgtccagcatattcatctgtaactataactgttttaacaccttgcatttctatcttcttacagttcattataaggtcagtatcaggatttccaaaaccttcttgtgaaactataactgcatctaatcctaaatatttacataatttagaagtccagtttgaagatctttctttatctgctaggtaaacattttcattagttataattacacctacaaagtttatatctttaccatgtcgtgcatataagtcttcaacaaccccattgtttatatgaacataacttgggtttttgtcacatgcagaaacacagttaccacttacaattgctccgtccattaattctgttggatataataaagttggtactatttgttttgcatctactccatatacataagtatcatgtaataaaccttgagtctgaagcatgtaaacatatcctacttttggaagctctggatattcttttattgattcaagaagaggtttagtttcatatactgaaacttcatctggagtaagatttcttgctacttctcctaagtacattgctgctttgaatcctatcattctaacagctttttcatgagcgtattgttttaaaccatcaataggttcagctattactactacattatttaatttagaaaatggagtatacttagctccttctccagtcatgtctattataccttcttggaaacctactatttttccagtagttacaacagctacaccttttaaagcatgagtttttccttctcctacagtatcaactttagacatgataccagggaagattcccccattaccttcaacttttactcttggctcaataacatcttttacaggtgttattcttacgctttcacctggacgagctaattctatatctatagatttaatatgctcatctccaccaatttcttgtagcatctcttgcttattgatgaataatactccatcttttacttctgttacatcaccaaattgaatatcttttataaagattttccctaattcaagacgcatacttgcacctcctgttatttaatttgtgtatatgcatttgagtttttctcaaaattatatcattttacaatttatcttatttttttaaagatatattattgtgtttttatgccttaaatctttattttattactaaaaaatatttattgtaaaaaaattattttatttaaaattatttttttaacaaagttggacataaaaacctttttcttcttatcttcagataaaaatagattttttcttttaatgttaatactttatcaacatattaaagatattttttaatcatgttttctatattaggaactgtagcatcatccttagtaacttcgtctactttttctccatctttgtatatagccatagttggaagacctaatactttttgttttatagctaatcttctagcttttgttgtatccatcttacagaattttattttatccccataagtctcagctaatttatgaacatctggcattaaagctttacaaggctcacaaccttcactccaaaaatcaacaaatacaaaaccttctgcatttaaaacttcttcttcaaatgtagccttatctaaatctaacattttcttattcccccttgaaatttttattttaattttaaatattattcattaaatttacagacactatttcttaatttacagattctagttcccaaatttttcatcaatgtatttctcagctactatagatgcaattgcgccatcattagttgcagttacaacctgtcttagagtcttagatctacaatctcctgctgcaaatacgcctggtatgttagttctcatatcttcatcagttattatgtaacctttttcatccatatcaactttacctttgaataaatcagtttgagcatctaatccaacgaacacaaatactcccattgttccatcttcttcatctgcaaagtattcatgagtttctccagtaactttatttttaaatacaactgattctaatattccatcacctttgatttcttcaattactgtatctaataaaaactctatctttggattagcttttgctttttcttcaacactcttagcacatctaaatccttgtcttctatgtacaattgttacttttctagcaaatttagttaaatacattgcttcttctaatgcactgtctcctccacctacaacaaatacttcaaaatcttcaaagaaatctgcatcacaagttgcacaatatgaaacccctttaccagtaagttctttttctccaggacaaccaatctttcttggtgttgctcctgttcctattattactgcttttgctctatattctgccttttccccttttaaaacttttatatctccatctagctcagtatcaacaatgttatctcttagcatttctgctccaaactctttacactgttcaaccattctagctattaaacttggtcctgttgcatttggaactgaccctggataatttgcaatttcatgtgttattacaatttgtccaccagtcttgtctttttctaggattagagtttttaactttgctcttgctccataaagacctgctgcaagcccagctggtcctgaaccaattattactaagtcatacacattttccattttgacttatcctccccaattaaatttctcattttatttaatattaaattagatttaatatttaggctgtttcaataactttttaacaaatttttttattcatactgcattctttgtattgtattataaaatatatcataatcaattactctaaaatcgtcttggacattttctgtccattttggagtctttttattatcctgaaatttacttgcagtgatgattgcttcttcaattaaggttaaagagtttatatccaaacgatttcctttctttagtataacagtcctgtaaggtgtttcatttggttttacactcccatagagtggatgagataaaagttcataaccttcatgtatcaaatctctacttgcttctaagattccaatataagttgtgtctttaaacaaaacttctctgccttgaacttcttcttttacttttggattattcgtaattattatcatttttttactctctttcaaacttttatttattacttgataaataaaaaacaggaaaaacaaatctcccaatttgtcttccctgttaaaatcattttcagagccccgtccaagtacagtcacctttacctgagaatttcatctaatcttttgggtaagtaagattaaacttgtcccttcggtcgctttttataaagcagtctcccatactcttcatccggattattatttttttcagaaaatttaaaattaagcaatttatcctttgttttctataaatagcttttttctatctctgttgacttaagtatataaacattctataaaatttgcaatagtttttttatatgtattttgtatacatttttacttttttttccaaatgttgatattgcatatttcttgtattttcttttttttttaagtacaaatcttttttagtttattttatcaatttagttaaaaacaagactattttcacaacaaataatcactttttatatattttttaatttttcacttttatacaataaaattctcataattttttataatttgctgtcatttatttcatcaaaccaagatttaacatcacctataatagactcaatacagccatcatcaaatggagaatacaaatttcccatactcacaatatctaaaaatgattttgttcctccaactttacagatatttatataatctttccatcctgcatctctatcttgaatcatttttttccaaaattgtaacgcacaaatttgagctaatacataatctatataataaaacggatttttaaatatatgtccttgtttaaaccaccaacaacctctctctaaaaaagaattatcaccatattttctatgaggtaagtattttttctctaaaaatctccagatttcttttcgttttgacttatctacattaggatttttgtaaatatagtgttgaaattcatcaacaattactccataaggtataaatttaattgaagatgataagtgagtgaatttgtacttatctgtatcttctttaaaaaataaatccatccacggccatgttataaattccatactcattgaatggatttcacaactatcaagcgttggaaaattaatttctggcatatcaatccatctagacatatacaactgaaatgcatgtcctgcctcatgtgttaacacatctatatcatcagcagtttgattaaaattagaaaaaatgaatggtgacttataatctggtatataagtacaataccctccagctccttttccttttttcgtttctaaatccataagttcattttctaacataaaatcaaaaaattcatttgtttcttttgacagttcagaatacatccttttaccattttgaattatgtatcttgaatctccctttaaacttgcatttcctgttaaaaattccacgccttcatctatgtaacttaaatattctagaccaattcttttagcttgtttttcataaagctcattggccattggaacaacatattttaatacttgttttctaacattttttatcatatcttctctgtagtcacttctcatcattctaacgtacccaagctctacaaaatcttcaaaacctagttttttagatatcttatctctaagtttaaccaatttatcaaatatgtcatcaaatttagtttcattttcttcaaagaaattataatatgctttgtttgctaattctcttgtttttctattcttagaatacatgaatttccccataccagataaatttcttatattcccatcaaacattatctcagctgaagctaaaagtctagtatactctgaacacaatttattttcttcctgcaattcacttattatttctttagaaaaactttttaaagaatactctactattgtgaaaaattgttctccaaactcttttatcaaatcatatttaaattttgaatttacaatagcattataaaaatgtgaatttaattcttcatacaaaggcatatattcatcccaataatttttttcttctttgtagaatttattaaatgtgtctgtactatatcttatcgaagctatatttgacaacgtttctattttatttcttaataaattaatcttatgtatatttttttgttgctctttataattacgagaattatttatatcttctacacaactcaaaaactcttttttcatactattataattgggtctttcatacttaaactctgaaaacttcatttaaagcactcctttacaactttactttattgtatttataaatatagatttacatgtactatgtaatacttttttataaattattatatatattaaatattctttatattataatcatgttgaataataacatatgattaatggaattacaatattttataacacaaaactaactaatataacaaattaccatcagtctatttattcaaacttctaactatataatatacatttatttatattaacaatgcaaacgataccattatttgtaattaagaattttggaattattgattacaaagtttttacattctcatctcacataagtaatatttttatcaaaaattaatattattaaactttctaaattacttatctcttgatataatagtatacaaaacaaaccatatttcccactgaaactttgttcaacactagctgtgtcaacgttttcacaggaaatttgagtatataatttattggaggttgatatgtacaaattaatcgcactagacattgatggaacaatattaaatacacaaaaaaggattactcctgaagtctttgagtccattcaggaggcaaaaagggctggggcaaaagtagttataacaacaggcagacctcttcctggtgtaaaagaacttctaaatcaactaaatttaacagatgaaggtgattatgttatatgctttaatggagcaattattcaagaagttaaaagtgagaaaatcatacatgatgtagaaatgactttagatgattttgattttatatataataacgtttgtaaaaaatataagactaaaatacacataaatacaatgacaaatttaattacaccaaatgaagcacctggaaaatatacacttcatgaagcgaaattaaataatatagaagtcaaatatatacaaaaagataaaattgatgaatctattaaaatctgtaaaattatgatagttgatgaaccagaaagattggaagaaatcatacagcaactacctaaaaatttattcaataaatatactatagtaaggtctgctcctttttatctagaatttttaggtaaaactactaataaaggaactgctcttaaaacattatgtacgaatctaaatatacctatagaaaatgctattgctgttggcgatgaagaaaatgaccaacatatgataaagtatgcaggtcttggtgtggctatggggaatgcacgtaatagtataaaggaaattgcagattatgttactgatactaataatgaaaatggagttgcaaaggttataaataaatatatacttaataaggctatctaatcatctaaaaaaactaaaaatatacctttagatttaaatacttttcacatccctactctatactaatttatatagtatggatattacctatcatttttatctaaaggtcatttttagtttttcatatatgtatatctatgatagtaccttttgtttgagtttaaatattttatatgattctactattgcctcattaatatctaaacaatatatatcttcatcatcagataatcccgcttcgtttgtccaagcatcaaaatcactcttcgtccagaagaaattcattatatttcagcaactagcagcccaatttagatgcttatcaagatttatatgaagcactcttaagtttggattattcacatactcaatcttttcattttttataattacttctatttccttacctgtagcactacaaatagagtttatttttatatcttggttgaatgtgcaagaggttcctatagcatctatagcacacattgcgctgaaacttctattatctctcaaagttactttatgatttgtttgcaatgctgatacaggatatataaaatttatactattcccatcaacaaccattatattttcataaataaaatattgtagtgtcctttctatatattctttttctatattcaactttttacttacatattcagtcacttcttgaagtgtaacactagaacctttatctattatcatatccataatagagattcttattttctgttgtgtattatccaaactattgtatttttctatttgactcatgtctactcctctttaaacttcataacactttgataaagtatcagttaatttgtttttgtactcttcatatttttggcttcctctaattctaggtcttggaatatctatatttatatcatcaataattcttcctttatctctcgacattactataactctatcactcatatatacagcttcatcaacatcatgagttaccattaatgcagttattttcttctttatccatattcgttctagctcttcctgtaaattttgtctcatttgaaaatctacagctcctaatggttcatccattagtaatacctctggattacatgctaaagctcttatcatggccactctttgtttcattcctccagataattgatgcggaaacagtttttcttttcctttcaagtctgacataaccaaaagttcttctagcatttcttctcttttttcttttggtattttctgctgtttcataggaaatagaacattacctcttatagttttccaaggaaataaagcataattttgaaatataaaagctctatctatgcccggttttttaactcttttatcatttataaaaacatctccacgttctgatttttgaaacccacctattatagtaagtaaagttgtttttccacaacctgatggtcctaaaagacagacaaattgtccatcatctatatccatacttatatcttctaaaacctttgtatgtactctattatttacaaatgtcttatttatatctcttacacttaacttcattaatctgcaaacctccatctacaaaggattttatttataaactttaataccctatctattataaatcctattaaagctgcaaatatcataagcccaattaatacatctgtatgcattaatgtttgagcttgtaccattgagtaaccgagaccggcactcgtagctataaactcggctcagataacagacatccatcctgtacttatagcaatccttgaaccagttagtatatctggaagagatgcgggaacaattacatttgtaaatatcacaattggcgatgctcccatacttctagctgcattataataatcctttgatattgctcttactccttgaatagtatttaaaattatagggaaaacccctgaaaaagctattaaaaatattgttggaccatctcctataccaaaccatactatagtaagaggaacccatgccattattggaacttgccttacagaatctactactggagataaaaccctttcaaaagttttagaaaatcccataataaatcctattggaagcccaaacaataatgcatacataaaacctttaagtactctctgcaatgttataaaaagattagtgactgtctctgcatctgtcacacagaaaaagaaaccttttattacatctactggcattggaagtaacaaagaactccctatatcttttgctgcaaaatgccagactaaaaatataataactaatagtattattttatataaaatatccatactaccatcagtttttttcttagttaatctatcgcttttatctttagaaattttaatttccaattgcttatttcctccatatctatatttcttatattcctgtactcttttaatgctttcttaaatgtagctttattctttaaagcatcaacacttttattgtaaagtgttataaaatcactatatgctttactttttttaaactctttacttacaactaatacataggtatcataatctcctaatttagttgtagattttcttttaccctctaacccaattgactttatgcaatctattacaacaccatctactaaattactttctaatccatatgctagtgcagtccctaataatggagctacttccacattcttgtagtattttttaaccaattctgactggtaatctctattttgaatgactcctatcttttcaggattattatcacttaatagaaatatatcagaattttgaactacagtaccaacaatttcaaatccactatttacatttacatattgttttgcagcatctttacatatgattgctatatctatttcctctgaactcagagcccactgcattgtacttgctcagcaatcattaattgtaaaaatatccattatatcacttacttttatattttcaaagtagtctctatttaccatataatttattacaaaaccagaggtatcatcagatacccctattcttaattttccttttatttcttctttatcttcaaaattaaaaaatattataaatatacttcccaaaataatgataaaaagtattattatattttttatattctccatttatttataatacctttgctttccagtcttcataactcataccttcaggaaactctgggttaactttttcttttataaatttgtcaaaatcatcagctccacaagagtccaataagcttgtatcaatcgtatcttcatatttaggtatatcatctaaagcctttaaatctttatacatttgtaaattatttttatattcttcacctgtaactttccaagtaagagttctaccttctccaacagtcttcttatagatagttctaagtgcaacttcttcttctacattataatattttgcaaatattttagctgcttcagctggatttgtatatatatattctattgcttttgtatgtgctagaaccaatttttttgctaaatctggatgttcttttataaagtttttgtttaatgagaatgaacaacagttatattctttgccattagctttttctttatattgagtagatgctattatttttcctgcaccgtcattttcagctacagaaccccaagggtcacaagatgtaaaagcttgaattttcccagttttaagagctaaatatttatctttgtctgaatccatatttacaacttcatattttgatgggtcagttggtagacctgtttctggaccataatcacttgtccataagaaatcactcatatctgttgcaatttttttacctattaaatctttaggttcttttatatcttttgaaactattaaatattcagaaccaccagtatggttgttagctgctattgttattggtgaacccttaggtattgctccaactaaccccttagttcctatgtaacctgcatccatttttcctgctgccatagcttcaggaactttaccatttccaacagtttttacattaagacctaaatctttatatattcctgccgattctgctactggtcccgcagtcatatggtcacaattataataacctactgttattgtataatcatcttttccagcttttgcttcttctttttcttttggtttactactacatcctgttaatatagatgtacccattacaccaaataagattagtgcttgaatcttcttagataatttcatataaatttcccacctttatgtattatttttatttttagcaacatttgtccatatcttcgccaaataaatcaacaaattttttaccctctactctgtaaatagcatatcctacattaccatttttagaccctgatactattacttctattggtgctttatcatcaatatttttaaaggttatagtttgattctctataggtgctggtattggctttgttatatagtggctatttttatcagaaactacgactaccatttcatttgaattattgctttttttatatataactactaaatcttttttcccatcattatttaaatcttcttcagcacaagttattatgtcttctttataattttttctaaaatattctaatgtttctttattcacatttggaatagaagcatcttctttgatgttatcatcaactatttttgataaaatgattaacacaactactatacaggatattataactatctttttaagcatgatttcctatgacctctttcatctttggtattgttgatttaaatgcaaataaaataattaaaatagtacatacatactcaaaactatcaggtatatttaacattagtttatttgccaactgtattgaagaatttgttgcatctaaatttactgaattattattcactaaaagtaaatttgttatatatccaattattattgaggacagtgtcaaagttacagaatatataataacagttctttttccaataagtttaaacatgcttataagttctggtagatttgtagctgctccagctattagaaatgttatcgctataccaggagatgctccacttgcaacaagggctgctataaacggtatatgtcctacagcacatacatacataacacatgcaagtattgctatacttccaagagatagcaaacctggatttcctaaatatttttgaattatactatttggaaaaatagttgttataaatcctgcaaaaaccatacccattactacatatttactaatagtaagggctaattcaccaaaagaccatttaagaccatcaatcatattttccataaaacttcttttttcttcttctaattctattacttcttcctctgaatcattataaagtgataattcttcttttccaaaacaatttcctaaaaatcctactaaaaatggtactaaaaaaccagctattagataaatgattgtaactttaggacctaaaagacctagacaaagaactacagctattggatttattattggagttgatgtcataaaagcaagtactggtcctaaatatgctcctgaataatacatacttattccaagtggtattactccacaactacatattggtaaaaacattcctgagatagtacttttaattaaagaagaaaatttcttatttccaagttgtttttgaaaccttcttggagttaaaacattgtgaagtacacctgccaatataaaacttatcataagccatcctgatgctccattcagtgtaactatagaagctactatagtatctttaactccatttaaaacaatttctaatatattcatttttgatactcctaatttttaaacttttaattattgtttatagcttctactattgccctttcaattgtatctttatttaatctatcatatttctttttctgatttattattaaagttccttttgttataatcccatatttttttatatacgaaaaatctttccctgcttgatataattttatttccaatttatcagcatacttttctgacattttttttataaacactccatgttcatcacaagatggtcaagtgtttataaattcaactaaaattttagacatttgttcatcccctactttaaacaatttatcttttacttaaaataatccacagaaaataaatttttctatggattgtatcctatactaatttataacgttataacttggtccacacctgcactgcctaaacaagcatataggtttgggaaacatccaattgtagctccatcaaccaaattattctctatacctctttctatagcacattggtcacaagccattattatcatatcagttttttcatgtaatttacttagtctctcgcctactggattacctttagataaaaataaggtattatccataaagaaaaacatccctagaacgtctactccatgagttccttgttcaagttgtggtattatcattttgtctagaattttatgtgtattagtactactaaaaatataagctactttcatttttattccccctatactttttatattttacaaaattttacagatacaattatattataagtttattcttatttatctgtaaaatagatattagctatattattaaaagtgtatatagtatttatctatttttattaaattattgattgatttttttatatttttattaattttaatgaataaaaaatagactccttaaatttataaaacaaatttaaggagtctattttaattaagtttatttcaatataaaacttatatatttctcaaattcttcatacttatatcgagagctttaacagaatgtgtaagcgctcctacagaaacaacatccacaccaatttttcctatatcttctatagtatctaaatttacatttccggaaaattctacaatggctcttccatttataatatctactgcttgttttgccatttccaaactcatattatccaacattattatatctgcattagcttctattgcttcttttaccatgtctaaagtttccacttccacttctatctttctaacaaaagaagtattttttctagctaattcaactgccttcttaacactaccagcagccccaatatggttgtctttaagcaatattccatcagataaattaaatctatgattgcatcctccacctactttaacagaatacttatctaatattctaagattaggtatcgtttttctactatctaataattttgtatttgtaccttcaagcttttcaacatacctacttgtaatagtagctataccactcattctctgtaaataattcaatgctacacgctctcctacaagtaagtttctagtactacctgttaatacagctatcttttcacgattctttactctatcaccatcatttttatataattttacatctacatcaccaagtatctcaaaaactctcttaaatacacctaagccagctattataccatcttgtttgcaaattaaatctacagtagatttagaattttcatccacaatagaattagttgttatatcttcacttggaacatcttctatcaaagcatcctgtatcattctatcaataatcaaataattcatcgccaaaatcctcacttgttctttcaatttcttttatgactaatattttattttctttttttacctgttctatatctatatccatatctggtacatctataaacttaacttttacattatctataactgagtttatatttttagctgctctttttgaaaatacaagcccttcaagtaatgaattacttgccaatctattggctccatgaacacctgtacaactaatttcaccaactgcatataaattttccatagatgtttttgaatccaaatctacatgtatcccgcccataaaataatgttgtgcaggagatacctttatacattctttcgttatatctgttcctctagctaaacattcattataaataaaagaaaatctattaattaaatattcactatctaaatgtgttgcatctaaatacacataaggtaatttatctttttccatttgctcaaaaatagcttttgaaactacatctctaggaagaagttcatccacaaatctttctttatttttatttaaaagtttagctccctctcctcttaatgattcagatataagcattctcctaccttcattattttcttcataaaaggctgtaggatgtatttgaatatattctaaattttctatttttatattatttcttaaagctattgcaattccatcacctgtaagatgtctttgattagtagaatttttaaaaagcccaccaattccacctgtagctaaaactactatttttgaaaaaacatgaatctcttttttagatttaaaaattctagctcctatacatttattgccatcttttaatatatctaaaagatatgcatcttctataagagttatattttctctagttttagcttcttttaataaagttttaaaaacaacttctccagtattatccttactatgaactattcgatttacactatgtgctccttctcttgtgtaatctatctctccattttctttgtctaaaggcataccatattctactatctgccctacattttctatagattcatctgcaagtacttgaactgcttcaactctatttttatactgcccagccttcattgtatcttctacaaaggattctatatcatcaatatttctagcagttgaaattccaccttgtgcaagatatgtattgttgttttcaattgttgatttcgatactactagcacatttaaacttttatctaaatttaatgcacagtataatcctgaaactccacttccaactattaaaacatcttgttctaaattcataagtctatccctctatccttctgctaatttgtgcatgttaagcagtgaatttaaagccttttccatgatttcatcttctacaataacttcattttccatatttttaagtgtactatataaattttctaatgttgtctttttcatatctgtacatagtatttttccaccaggaatataaaagtttttattaggattatttttctttaattcatgtaatataccttcttcagttgctattataaagtctttgtttttactattagtagcatattttattattccggatgtactacctacataatctcctaaatctcttatttcttttttacattctggatgtactaatacttctgcatttttatacttatcttttaattcaattatttcttcagctcttatattgttatggtatttacaatatccgtcccaaaatataaagtttttatctggaaattgttctgcaatatatcctcctaaatttttatctggaaggaatataatttctttattatctatgttttctagtattttaattgcactagaagatgtaacagaaacatcacaatgtgccttaactttagctgtagagtttatataacatacaaccaaagcatttggatactgttgttttaattttatcacgccttcttcatctaccatatctgccatagcacacccagcgttacttactggcatcaatacagttttttcaggtgataatagcttagcactttctcccataaaccttactccacaaaatacaaccacttcttctttacaatctctagcaatctcacttaaataatatgagtcaccaactgcatctgctaattcttgtatttctggtggttgataaaaatgggcaagtattattgcatttttttctttctttagctctttgatttgatatgttaaatctttatccataattgcaccgctttctatatgtactagtgtatatacacctgtaaacccattatatcacttgactattctttcttcaagaattttaaacctcttaatattgttaagatatagacatttatattctcaattgattttccttttttctccatctatttaaactaatttttatattttttaatttttttgtaaaatattatcagaattttgtttatattctttattgctataacattgaaaatattaccaaatacctgtatactaagtacatggttatgtatatgtatttatttctgaaattatattagttgtaatactttatagaatttgtaggttgtccagaattaaattcaatataaatctacacatttagataatatgtatacaaagaccaaaaaattttataaatggggtgatattatgacaacattcttaatcggcttggctatattactaataggaggtgctttatacggtgcttattgtgaaaaagtatttggcccagatgacagaaaaacacctgcacttgctcaaagtgatggagtagactatgtcccaatgaaaaaatggaaaaatagtctaattgagttgcttaatatagctggtacaggaccaattctaggacctatccaaggtatattgtttggtccaatagcattcatactaatacctattggctgtgtatttggaggagctttgcatgactatatgagtggaatgattagtataagagaaaaaggagcacaaatgccttctcttatcagtagatttttaggtaataaagtatttcaagtctataatatattcctttgtcttttaatgcttttagttggtgcagtttttatttatacacctggggatttagttgttactcaaattttaaatatgaaatcgactataaataatccagttgtctggatagtttatggacttatctttctatattacttgtgtgcaacactctttccaattgataaaatcataggaaaggtatatccaatatttggagctattctacttttatctgctgctggtgttggaattggaatctttacacaaggttatgatttagctaatttaagtcttgcaaattggaaaggtattcatcctgatggtattcctcttattcctacattctttgttacagttgcttgtggtatcgtttctggattccactcaactcaagctactcttatagcaagatcagtttcaaatgaaaaagaaggaaaaactactttttataatatgatgattttagaaggtttaattgcaatgatttgggctgcagctgctatgggtatttacaataaaggaatacctaaggaattagtaggttctcctgatgtaataggtttggttgcaagagatttacttggttctattggtggtatcatagctataataggtgtaattgttttaccaataacttctggagatacagctttaagatctttaagattaatgcttgcagattactttcattatgaccaaaaggaaaagaaacatcgtgttatattgtcaatctgtatatttattcctgtcatagccattcttatatttgcaaagcttagtgcttctggatttaatatattgtggagatacttctcttggagtaatcaaactattgccatatttgcatttgcaatgattacagtttaccttataataaaagaaaagaattatattataagcttaattcctggtatgttttattcttttgttatattcagttatatatttaatgctcaaattggatttaacttaaacataaatatatcatatgttttagctgccatatttactgtattatatgctattttaactgtacgctctggtagaaagttaaaaagcaaagcggatactaaattggctgactaaatctaaataaaataatacttagaataaattttattaaaaaatgataaaaaagtaggcaatctcaagttagatttgcctcttttttatttaatacagtaataaatacttaagtatttactccttattggaatatttatcctaaatctctaatataaataaataaaagttttaaaataatctattcatttatatacttaaaataaattttttggaggaatacttatgaataataaattacatgaacttgaaaaaaatctaccagaaacatcttgttctttttgcacacatctttcatttaaggggcctagcctagactatagatatgatattagatgtgttatttcagatacaaagcctgattttagaggatgttgtgaatattttgaaccagaatatacagaattaaatacaggagatttagacaatctatacataaactttcttgagacatgcctcaaggtaaattataatgattacatcaattctatgtattggaagttatttaaagaaagaaccctactagaaaacaattttaaatgttctatatgtggatcaactgaaaatgttgatgtgtatcatgttaataaaaatttaggaagggaaacttccaaagatgtagttgttaaatgtgataaatgtaattgtaaataagtgtataaaatttagataacttcacataataagtttaaataaaacttaggaggttatttatgaaaaataataatttaaattgtgctgctactaattgtgcttataatactagtggatattgttatgctggtagtataaaagtagatggaatgcaagcaactactacagaaaatacttattgtgcttcttttgaagacaaatatacatctggtataactagtcgttctaatgaaactaaccaagttgatacagataacattcattgtgaagctgtaaaatgtaaatacaataaaaatgaactttgcaaagctgaaaaagttcatataaatgaaagaaatgcaagttgtgaaacttttgaaatgaaataaatttctttttatttaattctatagtatttatacaaagcaaaattgaacctatcaaatagatgtctttattaatgatgtctatttataggttcttttttaaaacaattcataatttatatataaaaataaattattattttaatatattacctagaagtaaatttaacacccagaatatccataaggaacataaatattggaactccaattagtaatccccatacacctaaataatgttctcctacaagtaaaataataaaaacaaaacaaactggaagtttagttctattcgacatcaacttagggtttaatatgtatgtttctactgcatgcactatacaaatcataagtaaaactccaaaaacctttgttattcctcctgtattaaatgctattacagttaatggaatcaaagacactataactcctgctactggaataagacccaacacaaaaatcataaatcctaaagcccatatttgagggaatcccatgaaacctaagaaaatcatagaaacaacagaatttataaaggcaatcataacttgtactttcattacttcaccaaaatttttaacaaagctctttccaaaaaatacaagcgaattataaataaaagaaatcttactatcagaaagtttatctccaaaatttttaatttcatttttttcaagtaaaaggagtaaactcagtaaaaatgccaataatatatttactccaaaacttccaacttttgttgctgttgatgctataagtagccctgcttgtgaaatatatttattaaaatccagctttgagacaataggatacaattttggtcctaaagattgagcaaattgatttacatcaaaatcactaaaaaccctactcagctctgtaagttgaactataattattggtacaactgcatagctaatcaatactaacaatatagcaaatagtgcatataacactataattatcaatgaatctggaatatttaaagaagaaaacttcttaattcgttttcttgtggctacaagcaagttatagaaaataaaagtcataataaatgttaaaagcaccatatttaacatataccaaaatgtaattagaataattactacgacagatatagaaacaattttatattttgaactatcacgtgccaatcctttgttatcttccatagtttaaatcctccccaaatttttatgactttataatgactgccctttttattttaatctcaaaaaacaagtagaaaaatactaaaaataacttattaattttcataaaacaatattaaaatttagagaagatacattttaaataatcttacttatactgaaatctgctctacatcatatatttaatttattattatctatctcatatagcaattcgtacatctctggatattcaaaaaacaaaccctcttttagtaattgtcttatttcatctgtgcttacccactttatatcacttacttcttcctcctgtaaaatagctttggatatatcatattcttttttaactaagtatacatcccaaagagtatcttcatgaatcatacttctaaaaactttcatctcatctttagttatatctatccctatttcttcctttgcttcgcgaattgctccttctaaactatcttccccagaaacaatacatccagttgtcattccccacatatttggcaatgtctttttacttttagaccttttctgaattaaaatttgagagttactatttaaaatccacacttcaactgccaaatggtaataaccttcttcaatagaattacctctttttataacatttcctgttttaattccatcagcattatataaatcccataattccatttcaaaatctcctgactttactataaattagataaactacaaatatattttagcataattaattctgctcattttttattacaatacttgatttacatttatgttcattgcttctcttttccttccattctcttatatcatctataataaatctatgtttcagcaactttgtgtcaaatttaaatattctaaacactatttgtaatacatatcctaaacctaaagcacttacaagcgtaccaatacctacagaacctcctaataaccacccaacaactaatgctagtatttcaagaattgttctaacaagacgtacagatttattagtttttttctgaagagcaatcataagcccatctctcggtccacttcctaaacaaacacctaagtatagaaaacttgctatagctgccaaaataattcctataacaaccataaacacacctatataagtgttgcttgcatgaggtatcactccagaaaatattactaaatcaataaaaattcctataaatgtcatgttgagtaaagtaccccatcctatattttcaccaaaaactgcatccaatataacaattacaactcctaccattatagaagcctgacctatagttatgcctagctttatagataaaccttggtgaagtacatcccaaggcataagacctacatgtgcattaatcataagcacagaagaaattgcaaatataaaaaaacctgaaaataatcttatcatactttttaaacttatttttcccatcaaaaatcactcctcataataataataacaataaataccaataaaatatatatataaatacgaaattttacagaattatttattagattaagataaaattttaattataaaaagtggcaatccaaattttatacattttcacctatactctaagctttcgtgtataaaaaacggatataccacttttttagtatataaacatttttaatttttcttattaattttcactataaattctagcttcttcttctccatttagtactcttaaagttccaaaagcaagtgattccaactcattttctcctgccataatttctactggtgctataaactcaactttctttttaaccattgaagtaaacatttcagaatatgcaattccacctgttataattatagcatctacctttccatctactacagttgctaactctccaataccttttgctaactgataagccattgcttcataaataatttttgcttcttcatttccttctgctatcattttttcaacttctctagcatctacagtatttaggtatgaaactataccacctttacctcttatctttttagtcatttctctttctgaatattgacctgaataacaggcagccactaattttgtagcaggtactcttcctgacctttctggagaaaatggtccttcatcatcagatagcatatcaaccattcttcctttttcatgaagataaatacttactcctccaccaatgtgagctactattaagtttaagctcttataatcttttcctttatccttagcatattttaaagccattgctctagtatttaatgcatgccctgcacttgatctatccattccacaaagtccagatattctcgctacatctataagctcatctactgcaacagaatcataaatatatgagttgattccaagaggttctgatattgcatgtgccacaacagcacctaaattggaagcgtgttcaagtactggtctatgtcttagtacatcaatcatttcttcatttactagatatgctcctgattttactggtggtaaaactccacctcttcctactattgcactaagagattttaagtctatactattttctttaagaatattcaaaactgcttccttacgcatttcaaactggtcttgtatagtattatattttgcaatctcttcagctggatggtctatcgtcttcacaagaatttgttcttctccatcatatactgctatttttgtagaagtagaacctggatttatggctaatattctgtaagtcataattttcttcctttcaccttaatttctatagtctatttatatctattataaactatttgctaaccatttccataccttcatggaaagcttttatgtttaattcaacaaattttggtttaacattttcacttataattttttcccaatcaatagactctaattgcatagatttaactagacatcctaataaaataacattcattatttttgaatttcctagttcttcagctttatcagctgcatttataacttttgcatttaatctacttaactctgcatctatatcactttcttgatattcagctcctccgattaaaacagtcatagaatctatcctatgattatttactaaagcttttccttctggttttaaataattgaaccatcttaaagcttccattttttcaaaagatactaatatatctgctccaccaatttctataactggagaatgaacacaatctccatatctaacttgtgaggaaactgaacctcctctttgactcattccatgtatttcactcatctttacatcatatccagcttccatcaatcccatagttaataatttactagcaagtatagttccttgacctcctacacctaccaaaagtatactcttagtcatattatttttcctccttaactattgcttgttttggacaaacttgtgcacatactccacatcctacacactgatttctatctatatttgataacttattctctttatcaaatgatagagctggacatccagttttcaaacataatttacatcctatacatttatcatggtcaactttacacttagtcttaaatggattattaaattcttctatatcttctttagagaattttttaagtacacatggccatcttgttattattactgatggttcatcttctatagctaaagcccaatctagtgcttcatttacttcttttaaattgttagggtttataactcttacatgttctattccacaagctttaactaatccttctatatcaacttctttagttttagcaccttgtaaagtataccctgaacctgggttttcttggtgacctgtcattccagttattctattatctaatataaccgaaatagaattacctctattgtaaacaacatctaaaagtccatttattcctgtatggaagaatgttgagtctccaagtacacctaccaatcttttttcattatcatccttcatattaagaactttttgagctccatgtgcagttccaaaagcagaacccatacaaacaacataatctattccattatatggaggagcaaatccaagagtataacaacctatatctccaccaactattaaattttttctctttccaagttcatagaagaatcctctatgtggacatcctgcacagaaacttggtggtcttggtgttactaattcagatttgtattctatagtatcatttgtttttccaaatatagcttttcttaaaacatctggtgtcatttctccatatggtggtattacatcttttccaatacaatctattccatatgcttttatttgttcttctataaatgggtcattttcttctataacatatattttatcaactttttctgcaaattcttttattttttcataaggtaatggatttgtaaatcctagtttcatatatgatgcattttttccaaaaacttctttggcaaaattacaacacataccagaagctataacacctatttttgtatcattcatttcatagtagtttaaatcagtttcatttgagaattttttaaggatttccattctttcttcaacaacgccccttcttatttgagcatttgctggaacagttaccattttcttagcatttttaacatactctttaatttcaacttcttctctatcatagcactccactaatccttttgaatgacaaagtcttgttgtaactctatataaaactggtgtatcgtatttttcactaacttcaaaagcttcttttatcatatctttagcttcttgactagttgatggttcaaataaaggtatctttgcaaattttgcatacatcctattatcttgctcattttgagatgaatgcattcccggctcatctgctgtaataagtaccataccaccatttacccctgtatatgcataagtaaatattggatcagctgcaacattcaaaccaacatgtttcatagaagccattgttcttgctcctgcaattgaaccccctatagcagcctcaagtgctaccttttcgtttggagcccactctgcaactattgcatctttatatgttgctatattttctaatatttctgtacttggagtccctggatatgcagatgcatatttaacaccagcctcataggctccacgtgcaattgcttcattacctgtcatcaattgtttcatataaaattccctccatctacaattattaaattcatagtccacccaatttgttcaatgaaattaattatttatttttacttctaaactttcaagtgcttcttttataatacttggtgctttcttacatttatcttcagaaactgcacaaactgcaaatcttaagcccatttttaatggaactgcaaataaattatgtttagtcaattcttcacatacttcttttggattatcacatggtatacttacaaagaaacctgctatatatggaagaatttctaatcctactctttcagcttcttctacaaatacatctgctcttctagtaagcatgtttttgtatatttctttttcatcctcatattctttgaattttttagggtcatttacaatgttagataatactgccatggcacttctattacaatttgaccaatttgctctacatgaatgaacacatgagtaatggaactcttcagctacatcttcacttgaagatatacaaattatagcccccattctcataccataagctgtaaatccttttgacatactgaatccaaccaatacgagaacgttttcaggcaaattagaaaatttcttaaaaaactttctacatacatcatcatcacctgcaaagtcaatatatgctgaatctacgaaaaatattatctttttgtctttatcttttgcgacttcttttgataagtctaatattttatcccactcatcatctgcaacactatatccagttggattatgcgctggtgtgtttataattgtaaagactctaccttgtttttctgctatatttacaaatttttctttgaacgactcaaaattaaaccttctattttcatcaaaaagttggtaattaactacttttctattagcctcttcagctatacttacatatggactccaaaaccaatcagatgttaatacctcatctccttcattagtatagttccatacagctaattttattgcaccacttcctcctggtgaagctaatactcttatatgtccttctggtaagtaatctctgaaaaatacttttttaactgcttctaagtagtctggttgaccttcaagagctgcatatgcacctatctcacagttatctaatgctttatattcttcatatacagttttcattgttattaattttcctgaatcatccattagagcgcctattgttgcatttattacattatccataccaaaagccttctctgctgcttgagctctaccagatatgctaaatataacatcattttcttttggccacattgcatgcttaccaaccatactttgactcataccatcacccctaaaattgtatttactcttacattatatattaagcaattactatgccaataaatcccactttatgtaaaattgattttgtttagaattattatttttttcattattaaattaagtgttttaactatttttcttataaatatatatgcctgtctaaaaaaataaaaatttacaaaaaagtaatgttaatttttcttaacacttgttttaaaaaattaacattacttcaaaataatttatatgtaattatatttaaatatttttattgtatttcttccataaagatgtcctgcttattccaagaacttgtgcaacttcatttttagaaagtccctgagcaaaaagcatacttattattttttcttcaacatacttatttacttcttttatatctatacttatcttaccatcatttatcttacttatatttatagattcatcttggacttctacacttgctgtcgtttcagaattaaatttgtctacttcagagttaggaagtaattttttagttttaaaatctctatcttgtctcaatttaattttacctgtcacaacatatttttgagctattgtctttaactctcttacatttccaggccagctataattatatagcttatccatttcatctttagtcaaaacaaaattttcatctatactgtttattccattgagaccatcatcctttaatacttcatttacaaaattgttaaacaaaggtattatatcttctcttctgtctcttaaaggaggtatatttatctctaaactactcaatctataaaataagtctgctctaaatgtacccataactattttttcggttaaagattcgttcgttgctgctataatccttatatccagaggtattatataatcagaaccaattctcattatttgacgttcctctattactcttaatagttttgtctgaatattaaaggatagactatttatttcatctaaaaaaagagtccctccatgagcaagttcaaatagtcctctttttccaccctttctagcaccagtaaatgcaccttcttcatagccaaaaagttcactttcaagtaaattttctgctatagtagcacaatttatagcaacaaaaggcctatcttttcttttacttatattgtgtatactatgagctataatttctttaccagacccactttctccataaagtaaagttgtataatcactttttccaatttttttagcttcttcaataaattctctagttaatttatctttaaataaaaaatcatcaaaagtatatctagcatagagacctttttgattcaagtcaaatcttatttttctttctaagttttgtagcttggttatatcttgtattattcctaaaactccataagtactattatcaacttttattaatgttgtcctagtattaacaattagattatttatatttcttatctttctatcttctacatcctctttttcatgtaaacaatctaacatccactccattttaggaaatacatctaagatgtatttattaagtgcacattttctctctactttaagcatgttttttgcactttcattgtacaaaattatactaccattactatctatagcaattactccatcttttataccatcaagtatatttcgtaacacttcattattaaacttttcttcacctaatgtatccaataattttttacaatattctacagcttctcttatagattcatcactagcagttgcaaatacactatcaattccatattgccttgcaaaagaacatgccaaacctcctcctacgattacaacttcatctttttggtctatatattttacaactttacttcttatctcatacttagattcaaaccattcttcagttatttcagtacttatgacatttctccagccaacatagtcaaaagaaacttcattgtctccaagaatcaatactacttttttagaatatttctttgctatttctattgctcttaaaaggtcagttgacttcatattcattggtataacaggtacatttactgtatctattactaaactataacctccacctctaccaattatagcttgggcacctttttcaacaagtatacgaccttgattttccattaagtctaggttaagtatgtcgattattatagttccattttctacatcttctctatataattcttctattctttcttttaattcaatatcagaggctataattcctattttttttcgcaacaaaatcacctcaattttaaattataatgtattgatttctacctgctttttttgatttatataggttcttatctgcatcttcaattaatatttcaacatcttttctactacgacatctttttatacttactccagcacttatagttatatagttttttattttagaatatatatgttcaataccctcaaattcaagaagtttgaaaactcttttaatatataattctatattatcaatctcttcaacaccgattgattctatagaatctactagtattaaaatttcttctcccccatatctgattatatgttcggtaatatctataaatacacttcttataatatcagttaccttaactataactttatctcctgctagatgaccataattatcattataacttttaaaacaatctatatcgactagtattgcaaccatatttttgtctctggttccattaaataaatccaactgctgttccaaatatcttctattatatagtttagtaagtccatcttttaaaatatcattttctaatttcttattatcatccactagtaatcttaaactctcttgtttttgtctgagttcatattgtttgtgaattgcttgagatgttttataggaattatttttttcccacctatcagaataccaatccatacttttataatattctattgccagtttaaaatctttttttagctcatatccatttgctattagcccataaaatatagatatttttctaagattcaatgaactctttttaactaaatttaaaccttttatataacaacttataccttcatctatattaccaaattttatatataaatctccatacaacttatatatgtaatctagtttagaattatatataaaaacatcgccaaaacttttatatatattttttgataaaattaaataggtatttaccttttcaaaactacaattatctttccttaactcaatttcagctgaatataaaaatataaatgaatataaataatccttatatacaccttcaacaactttcattaattttatagtctttaataaaataacttctgcttctttattcatatcttcttttaaatatgcccatataaggtctatctttatagacactctttcagttactgatattgagttcttactgtgcgcaacatctaatacattatttatgtattttatagcttctacattatttccactctctaaataacacaaacttattatacatttacaaaaagcctctatagaatataaattattttcttgagccagttttagacattcaattaggtactccatactttttataaagttattaaataaatatagataaactctcccaaatatataatttgccctacttacaagagctttattttttaaagttttaaaaaaagacacttcttctactaaagctattacatccgttttggtctgatataaagcacttatttctacacataaactcatatttaacaagactagcaactcatttaaatgattttgtcttataactttttttgctgagaaataaaaattatttgccttatcatattttcttatagaaatagctgataaagtaagataaatataaattttagatattatatctgaatcttcttttaatgacaattttttaatatactttaatgactctatcaaatagttgtatgatgcttctctatctttttttatatagtttataaggctaattaaatataaagtatagactctactattatcttctagttttgtatttaaaaggtctttgtgataatccaagatgtagtttaaatctgtcaaatttagatagaatttagtcaacatatcgtattctatcttgtttatatttctctttaaatcttctattaaactccttttcaagtaaatcaccaatcctatttcaacagttaaaaattcttaaaatcatgataatgcaaacatctatttctaccactttcctttgctttatataaagctttatcagcattttcaattatttctcttatatctatactactatttttacatgtatcaatgccaatactaactgtcaaattattgtttaaaaatttctttacaatcctacataattttcttccaaatattttgctttttttataatctttacatacagataatatcagaaattcttctccaccataccttatcataaacatgtctttttttagatatttttttattattatagttatatttttaagagcaatatctccattatagtgtccataagtatcattgtattctttaaagtaatctacatctatcataaatgctgtgcaatattcactaacttcttgtttttctaaaaaatcgttcaaaaaagttctattatatgcacttgtcaaatggtcaacatatttttttttatctaaatcaagttttacttttctcatgttatttatttctgtttctatatactcatgtctataatttaaggaatctatataatttctatttcgagcttttatatacatcatttttaactcataatacattttaaagtatttcatactcatttcataattttgaatcttttcaaaacacaaatatatattcttgtatgctaacttcacataattataatttttagcatttttagatttttcaaggagttttttatttgtgtttaaggcattgtcataatatccaaagatataatatatctttgcctgatgataaattatttctaaatcatatattgtatattcttctatattttttatcatatttaagatgtttttagctctatctaaatagcatattgattgttcaaaagatttttcattactttttgcataatacatagctaaacttataaataaatcaaacttctctacttcttttaagctctgatttttaattttttctagatatacttcagattttgctaaattatttattgctacaggataatttctagtctttattaatattttagttatgttgtttgatgctctatatttttgaattatatttacatttctatactttttattgcttattacttcattgaaatattctatggaacattcataattttcaaatgaacattcacactcacctatctttatattacatagtgaagatacttgcatatcctttagtaaatctgcatattttcttgcttttaaaaaatttactttagcaattagagcatcatccaaaaacaaaaaatatattttaccaataataaaaaaatatatttttttacagttaaaatcgttaatttcttttatctttatatacaatgtttctatttctttaattattacagaagattctatacacttacttgccttaatgtaaataagttgtgatttaaaaataatttcttcaattagaaaattattttcatcacaaataagattaaatttatccatatataaatttgccttatttacatcttcattttttaaacttaaaatagctatttgtgaataaaatcgtgctaaaaatttataatctttgggtaagcatttatcaatatatttacaggaaatcaaaatatactctttcattttttcactaaacccttgaataccatataataaagctagcaaaaaatttgattttaataacattaaactattttgttcagttttatagcaatcaattaaattctttactacaccaattttattttcaacaaaatcgttattagtcaataatctttcattcaaggttagtttaaacattgaatctaaaattgtatcatctatctcttccaaatatttactatatattgtaactcacctccgacttacattatctcataaatttagtaattttccatactatttttgaaaaaaattgatgtctcaatttagaaatttctcttaaattaagacatactttacactaaactatacaattttctatctgaactatataatcctgacaattttcacaaattatcacacttacaatataactattatcaactttatttgcccttgatagtttattaaaagatagtcctttataatcaacagatatattgcttattacatattctccatctttactgaaaatataaaagtgatattctaaaaaaggaaagaattttttcttttcttttactccttctaaacataatggacatgcttcttgataatattctacatcaaaatcaacttcttctgcttcattaagtatatcaattatttttgaaatacttactccttgaactggattttcttcatcatttattaaagcactacagttctcctcttttaataaatattccttatcatcatatataaacttgtataaactcatattatatcctccttataattattaatctccaagttattctaccacttaaataaagttaataaaagtaattgtttataatctttataattaagttatgtatacatatattcctatacactatcttaattaatgattttaaaatccaagtttacactttgaacatccagtttcccaaaatctattgtcaaaactcactttagttattaatataaggatataaatatataactgcatagatgttacacacttaactatttaatatgatacgatttagtatctaaatttatatattgtatatagggggagatatatatgtataaagataaaagtgatgaatgtatacacttaatgactgcatacatcgatagtataagtggatattattcatttattgacacacaattagaagattttatggtgaaatatggtgaaaacattgttgattcaaatttacacagtataatgatgttgctttgtaaatggggattatcttagcattttaagaaacttttttgtatattgtattctatattatttattcattaataaaaaaagattgacataaacttaaaagctatatatagatttctttaaaaatctatatatagcttttttaattttttcaaaatgtatacttaaataagttagttttttttcaaaatttgactatctaatatgatataatttaactatctacaacaataaaaaatatctaatatgtattatctagtttagctcatcataataacatccctatatttacaattaagatattttcaatatagtaatactcaattttaatattataaaaaggagagattttgtatgaattacaatgacttactaaaatcagctagagagaactttaatggaacatgtaaagtatgtaaaatttgtaatggattagcttgtgctggagatgttcctggtatgggtggtaaaggaagtggttcgtctttcattgaaaatagaaaaagtctagaaaaaataaagataaatatgagagttatacataatgtttcaaagccagatacatccatagaattatttggtagaaaaatgagttctcctatattcgctgcacctgtatcaggtactctattgaacatgggtggtaaagtttccgaaaaagaatacatagagcctgttgttagaggttgttctaattctggaatttatgctatggttggcgatactaatgtagatacttttttactggataatttagatgtgttgaaagataatagtggaaatggaattgtatttataaagccttggaataattcaaagataatagaaaaaattagattgtctgaagaagcaggtgcttttgcagttggtgtagaccttgatgcttgtggacttattaataatcaatttcaagaaaatcctttttctcctaagacaattgatgagattagagaattggttgaatctactaaattaccttttattataaaaggaattatgactgtagatgatgctttgatggctgtagagtctggtgctagtgccattattgtttcaaatcatggtggaagagtacttgattatactcctggtacttgtgaggtacttccagatatagctaagtctgtaaagggaaagataacaatacttgttgatggtggagttaggactggtgttgatgtagttaagatgcttggattgggtgctgatgctgttttgatgggaagaccttttgttactgcttcttttggcggtggtcttgatggtgtggagttttttatagagaaggttaggaatgagttatgtgagactatgattttgactggttgtcaaaatgttaaggatatagatggtagagttatatggaatttattgtaaaatatttctagactctaagatactgattaatatattctatataaaaaagttgtcgccctatttcttagtgcgacaacctcttttctaataacgctctccgacagcttgccaagtggcttttccaacaacaccatcttttgttacaccaagtcttccttgaagtatttttacttgattatatgtagcaggtccaaatttactatctggatcaatatcagaaccatttatttgttgacataaaagttgtactaaatgcacaggattccctttttctacatgtccatatcctactacagtggtatttatatttacgctataacttataggaccagtagcatcaaaacgatttaaatcttttttatatctaataataaatgcttttggttcaatattataatcatctatattaatattatatgaatctataaatttttcattaataaagattgtatcatctttagatggatttatatttaattctttacatttttttcataatcagattttataggttgtggtacattttcataaataaattcgtaaccagttattgtaaatgaatttgttgtttgctcttcattactttttcatacatttacatcattattagtatttgcaaatactaaactaatagatattagagtcaccctccctgtgactactaagattttttttagatttttaatttcaaaacttctcctaatttgttaataaattataatactataaaaatctattaatttacaactctcatgctaatatcatcttcttccttaagatctgcgcctgttttttctaaaatccctatatttcttaaataatttgaattatcaaaactaatactttcaaaattaaaatatgtaactgaaaataatgtaaacaaaatcaataacatcaatattccacttttcccttttttcttaataatactatcaagtctcttttccaaatttgtcttattaaattcagttgttaaaataccactattataattcttactaagtttaattgactttataagtgctaacgcatatgctttcttatcttttaaagagcaatcagtcaaaacactttcatcacaacataattcacaatctagatttactttattgctcattatataaacaagtggattaaaccaatacattattttaacagacaaaactaaaaactttattaaaatatctttgtttttaaaatgcattaattcatgtttcaaaatccaagttaactcatctttactataagtatagtctggtaagaatatgtaagatttaaataatcccatacctgctggacttatcaattcatcagaacctcttaactcaattttcttttttatgtctaattcttttaacaaatttttatagatacaatttacatcatgatcttcaatatcataagatacatcaacaacgagatttttaaattttgtgtattccataaatgtataaactgcaatggctatagttacaaataaccataaataaactaaatacagcataaaatcattatctatagaaacatcaatttgtgtaatattatttcctactgtattttccttgggctcttttacttcatacattactgtataattaaatagaaaaagtaacattctaaagactattaccaaccaaatataataattaaatctcttactaaacctcttaaaaaaatatcttttcaaaaataataatagacaaataccaaaactacatacaatagttgtctttataagattgtcaaaaacatatagcatataattattcattctttaaattatcaaaataactttctaaaaaatctagcgtgtctttacctatattttcatcatcatgtaatgctgaaattaagcttttcaaagaatcatcatgtatattacttaggaaatcctttgtctcaaaacttaaataatctttgtgttttactattactgtgtaatgtgtatatctgtctattttttgagcatttaagaatcctctttttactaacctcgataaaagtgttagtgtagtggtttgtttccaaccatatttttgttccataacttcaataacatcttttgatgtcactgtagcatctactttccaaataaatttcattacttttagttctgcttgtggtatttttcttatcatcatttacacctccctcaaaactcttgctactttaagtctacaatatgtgaattttttagtcaaacgctttatgaaaaaatgtggatttttgtactttttattaattttctaattttttaaaatactaaaagttagattttaaaatatagttgttcaagtattttgctttttacatatttaattataatagtgcagaatgttatttccacattaaaattatttaataaaaattcctatattttcacacaaggaatattataatacttttttttaaataaactagagtaatatctaataaattttaacaatctcctaattgtacctttgtgttattaaaatatctgttttatataagtttatgttataagtaaaattatacatagcaaataaaggtataaaaacaccattttcagtgtctttaaaataaagtttgtattcttctaaaaagttgtgataattaaaatatcactactatacaaaggaagatgttcactttttatgtttaacaaaaactaaaatattaaaaaaatttattgaagaatatgatgccaaaacaattacagatattcaagatatactaaaagatttatttgaaagtacaatccattaaatgttagaagcggagcttaatgaacttttaggttatgatagaaaatgatatattaggaataaaaaatcaagtgattggaatatactcaaaaggcatgtctactcaaaatatattaagtcatcttaaaagtacttatggaattgatattatctcattcactaataactaaaactactgataaagttattcctttaactcataaatggtaacttagacctcttaatataatttattcaattgtatttatagatgctatacattataaagttagaagtgaggtcgaataataaacaaaacagtctatatagctatatgtagcataaaagaggttttaagaatatggattggagaaaatgaaatttcaaagtattggctaaaagtgcttatagatgctagaaacatgggaattaaagatgtattaatagcagcttctatagatagactagttgaattttctaatgcaattaaagcgatatttcctgatacttaagtacaaagatatgttgtgcatcaaattaaaaatactttaaattatgtatcatataaaaatagaaaagaatctgtaaaagatttaaagaaagatatgctacaattacagaagaggtagcattaagtgagctatcactagagaaaaaatagtacaatcaatatacaatagtattaagaggttggtgaaacaattggaatgaattagtaacatattttaagtactctcaagaaataaatacatcgatatatactacaaattcaatgggaagttagaatagattattaagaaaagttactaaattgaaatctatttttactttggataattatttgcacaaatcactatacttaacaaccatatatatttcttaaaaatggactcagaaaattagaaattgtgctcaaattttagctcatttaagtatttattttgaagaaagaaatttttcaaaaaaacaagaaattttcttaaagggttaatagcttttgcaaaaatggaaaagatatcaaaataaggctatgatttttaaagccatagccctattagtaaaaatttaattatcacttaaaaaataaatttttatttaaagaatacatgtaaatgtttacagattcagcaatttaaaattatctgtgcaatagctttctttttaaagacgtcttccagctgcatcccaagtacttcttccaacaattccatctcttgttaatccaagtcttccttgaagtgacttaactgcattatatgtagcaggtccaaattcactatcatcatcaatacttgaaccatctaaggttctacataaaagttgaactaaatgcacaggattacctgattcaacacgattatatccgactacagtattacttacatttaatgtataactcttaggtccagtaacttcaaaaacataaccttttttatatctaataatatatgcttttggctcaacatagttttctacatcatttgcatctatagaatctttgttaacaaaaattatatcatttttagatggttttatatttagcgcttcacattttttttcataatcaaattttacagattgtggtgcgttttcatatgtaaattcataaccagttatagtacatgaacttattattgaatcatcatcctttgatgtatctacatcagtagtagtatttgcaaataccaaactagtagatattagagttagacaacctgtaattattaaaattttttttaaatttttcatttcataattcctcctaatttattaataatacgacaatataccttttcattacatacattaatctattaatttataactctcatgctaatatcatcttcttccttaagatctactcctgatttttgtaaaatccccatattccttaaagaatttgaattatcaaaactaatactttcaaaattaaaatatgtaactgaaaataatgtaatcaaaatcaataacaccaatattccatttttaccttttttcttaacaatactgtcaagtctcttttccagacttgtcttattaaactctgttgttaaaataccactattataattcttactaagtttaattgactttataagtgctaatgcatactccttcttatcctttaaagaacaatcagtcaaaacactttcatcacaacataattcacaatctagatttactttattgctcattacataaacaagtggattaaaccaatatattattctaacagataacactaaaaactttattaaaatatctttatttttaaaatgcattaattcatgtttcaaaatccaagttagttcatctttactataaggatagtctggtaagaatatgtaagatttaaataatcccatgcctgctgggcttatcaattcatcagaacctcttaattcaattttcttttttatatttaattctttcaacaagtttttgtagatacagtttacatcattatcttcaatatcataagatacatcaacaactagatttttaaatcttgtatactttataaatgtataaactgcaatgactatagttacaactaaccataaataagctacatacaacataagattattatctgtagaaatatcaatttgtgtaatattatttcctactgcattttctttgggttcttttacttcatacactattgtataattaaatagaaaaagtaacattctaaagactattatcaaccaaatataataattgaatctcttactaaacttcttaaataaatatcttttcaaaaataataatagacaaataccaagactacatacaatagttgtctttataagattttcaaaaacatatagcatataattattcatcctttaagttatcaaaataactttctagaaaatctagcttatctttacctatattttcatcatcatgtaatgctgaaattaagcttctcaaagagtcatcatgtatattacttaggaaatcctttgtctcaaaacttaaataatctttgtgttttactcttattgtgtaatgtgtatatctgtctattttttgagcatctaagaatcctctttttaccagcctagataaaagtgtcagtgtagtagtttgtttccagccatatttttgttccatagcttcaataacatcttttgatgtcactgtaacatctactttccaaatgaatttcattacttttagttctgcttgtggtatttttcttatcattatttacacctccctcaaaactcctgctaccttaattctacaacatgtgaattttttagtcaaacactttatgaaaaaaatgtgaatttttgtactttttgttaaatttctaatttttttacaatattaaaagttagattttaaaatatatctatttaaatattttactttttacatatttaattacaatagtgtagaatgttatttacacattaaaactatttaataaaaattcctatattttcacacaaggaatattataatacttttttttaaaataaactagagtaatatctaataaattttaataaccttctaaattatgcctttatgctattaaaacatctattttatactgattatttacaaatatatctaaattaattataaattttattgaataagacttttataattatacctttaataaattataaaaaagcacttttataaaaaaatgtgcttttaatatctactaataaagttctttattttaattaaaacataattatattttagtattataatcttttaattttagcattatagtttatgtattataccctaatatattttattttaaattactagttaatcactcttttctggttatttatctcctatatattaaagtgtcacacctaaatagttaaatcattatcctcttttatctttattgcctttacaaatccatctgcaattacaaaactcataagagaagttataaaatatacaaatactggaacagtaaaataaaatccaaatcctaaatctaggaatctcattccttttccagtagtaccaaaagttgaaataaactccattatagagtttaaaagcaaaagatatccaataatcctaaatctttttacattatcttttacaaataagctatgttcagaactacttaatacttctatcaatgattttataatgataaaatatgatacacctaaaataaacattaatattccagaaatagtgccttgtagagttgcttctccactaaaacagaggtacataaaacttttaaatcctcccacaacaattactaaccctaaaagaaaaaataaaatttgtaatataccacttagtaaattttttataagtttattaggcatcataccaactcctttaaaatattttatatatagtataatacattatattatatcgtttttcaataaaaatattataattaacaatatatttttattgttaattatgcaaataaaaaagagtataataaaagcctttaaaatacatttttttcttattttaaaggctttttatattctacatttttattttctatattatatcctttgataatcgttacatctaaaatagaacttattaccctaaatataagtatctttataactagaatagtccattacaacagcatctccagattaatccactgatacctctttattatcaatatctaaaattgaaattttacaattcccacccaatttttcttgaactattttagctaattcatttaaagcattttcaaattctttaaatctactttcatctactaattcaatgcataaaaaggcattgttagtatcttcagtaagcattgttctcactgcttcacgccaattccaacatctacaaattgctccaccatcatctttataaattatttctccttcatatggaaatgaattttcatctgtccctagtgggataaactcctcattaccaattgctctagttagcctaatatctcctataaatttatctatatcctcccctccacaaggtaatgcatattttaatgagataaaattgtagatatccactaaagggttaatagttcctatattatttccattatgaactctttttaataatgcttcaatagaagaccttgctccttttttcgttttaaattttttaaatgcctctctccatactttaatcacttggttgttgctaaattctgagtcctccaagtattttaatgcttcttcttctcccttcaaaattattttcttatagtcttcatcttttatagagttatctatatcattacaaataataactccaatttttgcactaggaaatagattccaaaatgcatcctcaataacaaattttttcattagaaaacctcctcaaatttaaaatatgtaaaaataaaaaagcctatagaaatattattaaatatctcccaggcttttatccttccgtgtacacaacaattgcgcgttttctcttggacctgaccattataaaatgcggaaccctagaaaactaaattataagttttttaatttacaaaatacaattaaattttagcataatatagcatttaaaacaatattctattatctagtttgtacattaaaacaatttgccattagattataattatggtggcaaatgggtggcaaatcaccttttttattacatttttgtttgtttaaactattgaaaatactatattcttacaattttaatcaatttctgatttaaatggagtgtcatcagcttttgctattctatactccttatcagttatataaccaagctgatgcatcttatacagtacaatcacttgtctcttcttagcctctccatggtcaatataccttgcaggattatttgtcataccagctaacatagcacactcagctaaatttaattcactaacttttttaccaaagtagacttcagctccctttgcagctccatatgcatttttacctagatacatattatttaaatatgcctcaagaatttcatccttagtcataatcttattcatctgcttagcattatacatatcccttattttccgcttcatagttttatcattactagtaagcaggttttttgaaacttgcatatctatagtacttgcaccttgtgttgtatctgtaaacacattgtttaatactgacctaactagagaaataacatctactcctttatgcttataaaatctctcatcttctatggaaactattgcatgttttaaatcatttggcatttgttttatacttacaacctcactacttatatatttagacctaattaactttttagtaacttctggtgacccttttatagctgaaactgtaaatattgcacctgccactgaaaatataattagtgcaactaacataatagataataatgccctaactattctaatccttttttgtttttttctttttttactttttaattttttctctctttgtttatactcgactcttcttctttctctttgattgtaatctgtatttaaaggtcttacattatctcttgtaaaactatctctatctctttttataagattctgtgaatctactttttcactcattcttttactggaacttgtattaggacttttattttttttatttgccgaagtataagaatgtttagattttttattactatctttgttgttactaatttttttacgtcttattttattattatcattatcattgtaataacccattttagtctcccttcttcatataaggtacattatacattgttctacaaaataaatcaaagaacaaaattgtaagcttaagggtcaattttataaaggatattttcactaattttctctatatttataattaatattcatcttttattttcaaaaatagttttgcagttgctaatgtatcactgtcagctctatgagcatttatattctctatgttgtaataagcacaagctgtttcaagtttcttgttttttcctttataacttttacatttttttaataattctactgtacatatataattgtttattggttctaaatctaacatcctaagatagtaatttaaaaattttaaatcaaatttcgcattgtgtgcaattatagttctatcacctatgtattttctaaatctaggtaaaactaattctagtggttcttcattttctaccatttcattacttatatgtgtcaattctgttataaatgaagaaattatccccttaggttttatcaaccttgaatagttttttacaatttgttcattttttatttctgttattcctatttctattatttcacaacctttatatggatctaatcctgtagtttctaaatccacaactacatattctttcatatctcttctccttattattaaatggatatatttatattctatatttatgtaatagactaatcaatacttaattttatatgatataggaagattttacaaattacaacatagatatatcctatattccatcataaataaagatttttttattagaataattaaacttttaatttattgttatttaatctattttgataaacattatttattttattattatttaaatctttaaaatctaaacttttacattgttcatcattttcccatattcctgcttgtttatttccatcatttttatataatacacccttaccatttttcttattatctaaaaaatatcccttataaatgtcattattgggatatgttaattttcccaaaccattttttaatccgtatttaaattcacctgtatatattgaaccatctctataagtatattttcctattccatgcatcttgtcatctttccataatccttcatacttttccttacttgaaaaaatatatattccaaatccatttttctttccatcaacaaactcacctttatataaatcaccattatcgtatttaaatactttttcttcctttaatttcttattgttactcttatttttattattattgttatcctttatatgtatttcttctcttctggcttcaataaaatctctatcatacctaaatccgtttcttgatttaattttttgattaatcttcttcttattaataaatactctagctagttgagtaaatataaatacagatgataagcatataaatacacatagtattgttgtaaaataactagttatattttccataaaaaatcaccctttaaaaaatttatttaaaatacctaatataatatatatttttattaaatgttatttatacttttatagtactatattgaataaaattaactttgaaattatttacattaaaataaatcaaatacaaatgccataaattaagtgtttctagttagcataaaaatacttataaagtatgctcaaatatttcaaataaatacttttattcaaataaatctctacttatataagtgcttatataaataaaaagatgaactatagtaaatatagttcatcttttttataatagtatttatttaaaattaatatttatttagttagtagcatctacttagatatcagataagaaagcacagtcatttacttataataagttcttttcatatattttttattataattattcttttacaagaacttttataatttctgaaatgtacatagtatgatagtctttctctggataccattttttatcattttctttagcatcaaagttttctggtggcatattaccatgatatagctttttacatactataatcatattagcttcttcaaaagctaccgtatcatccacaaaatatggtgtaagtcctgctttttctattttatttatatctctaccagaaatagtaccacaaatatttaaagcctctctatacgtttcatcaaagaaggcaactgtaaatgtatcattactatctacaaattcttttgtatatctctgtggtcttatgtaagttgtaacaacatttttaccccaatagactccaacaccaccccagctagcagtcattgtgttaaacttttctgaatcaccagctgttataagtaaccattctttgccaatcttagtaaatggattaaactgtagttcctcaatttttacttctctaaaacccatgacttcatcctacccttcattttttaattatataaattaattgttaaaaatttgaatatatgtactcttataatactgacttttgattgtcctacataattcatgtaaattataatacaacaaatcaattactttcgcaataagtagttttcatattttataagtgtaaaatatagataaaatatattgattataaagtatataatatatttttaaacctaaagcaatatacaataaaaaaatgtagaaagtaagtatctctctacattttttattatatattatttttatattaatttaattttatcttgattcagttttataaaaaattgttataattgtcaagttctactctattatttgtaatttcttatatcttgttaacaacatttaagttattacatttatttatatatattttttcattatctaagtcttcatcaaacatttttattatattttttatctcatacttgtactcatcttcattcattctataaagcattaaatcttctaatacatctttcatgtcgaggtacacatcttctaataaataaaaatagccttcctctatatctttcaatttatctatagtatccatttttttatttatatctttcataatttctaaattttgtatatttacatctatgattgttaataagtacattctcacagtttttattatttcaacagaaaaatctacaatattataatttccttcttttttatataatgactccttaaatttgttaaaacaattatctaaattagaatttatatcgttaaatggtggtcttattatgtcacgtattattaaaagattttgtatatctacattatttgtgattgcctcatccaaaataaataaattatatgcatcatttaatgggtcatgggcatctccactaaactctaagttaacaaattcaagtaaatttttcaatgatatatagttcatacatctcataccacaatttatatatttttcttttatatctacaaataaatctctaatattatttacaaaccttggatggttattttttttagcacttctcatatctgtgttattgaaacatgtcaaatccaaattaccaaaagtatatattcctttaatatcagaaaatatgccaagccattttttaaattttctcatgacctcttcataacttggtgcactcttcaattcttcagaagatatatgtgttaattcttgtatatgaggatataactcctcattacttactggtcttattaaagatttaaatttatcaatattttttgttttttcatcatacataactgctccgattgcaattatatcagaattaaatactgctctttttgatttagaatttggcatattcatttcaaaatctatatatactcttttcaatataaacaccctttccaattgtttatagtgattctttttaactatttttattcaaaattttctaagaaagaatgtttctccccatctttttgccaaccaagtactgaatcaagatttacattttctgctgccttaaatatagatttttctacatttttaaaatttgattctaagctctttattaagtcttttatctcatatcttttattacctgtttttttagcagcaaccatacatgcacaatttaatggccatataccactattttgaataaatcttataatatgttcttctcttatataataaagtggtcttataatttttataccttcaaaattagtagaattaagtttaggaagcattgttttaaaatttccagcacacaataagttaagcattgttgtctctattacatcatcataatgatgacctaatgcaagtttgttacaccctaattcttctgcctttgaatataatgctcctctcctcattcttgcacacatatagcatggataatcttttgctatttcatctgctatctcaaatattcttgaatcaaataaatgtattggtatatttagatactcacaattatctataagtaattgtcttatatttgcatggtatccagggtccatagcaataaattcaacatcaaaattaacttgtccatgtttttttaactcttgaaacattttagccataagaatactgtcttttccaccagaaatcgctacagctatcttatccccttcttcaaccaatttataatctcttattgacttcataaacttagaccataaattttttctatatttctttattatacttttttctatatctcttactggaagtctttcctcaaaaggaactataatttcacagccttttcctgatagttcactcatctaatcacctcgtatatttatgtatatttatgttaataatattttacaaaaaagtctaccttcatccacaaaatactataatttttactttaattttactaaataatttatagtttacaataacacataaacttataataacataaataacctctttcttttattatcttttttatttttctcatttaatattttattattagtaacgatttttaaatgattgaatattatacactagatagagttacctatctatttacaacaaggaggttttcatcttggaaaataagactagagatatcaaaaaaaattgtggtccatctttggctagaccatacattaataatcaaattttcacagaaatgtactgcctttctgatgcattaaaatttggaactatatttccagaactaaacttactagagtctgaaatgtacaacaaagaattatatgctaagccaaaaaaatatagaggaggtagaagataatgaaagactcatctagagctgaacttatgagaaaagttcaggaaacatcttttgcatgtgttgatatgaacttatatttagacaatcaccctgatgataaaaatgctatcaacacttataattcattatgtaatcaatttgcgcaagctagatatgcttacgaaaataaatacggtcctttaactaactttgggtatgctccaagtagatgcccttggcaatgggctgaccaaccttggccttgggacagagaatttaattattagacatcaagtattggaggattgaaaattcatgtggatatatcagaaaactatacaacacccagttaatataaaaacttgtgaccctagaatggctaaatttcttataactcaatttggtgggccaaatggagaacttgctgcatctttaagatatttaagccaaagatatacaatgcctactggtaatatgcgtgcacttttaacagatattggtacagaagagctagctcacgttgagcttatatgtactatggtttatcaattaacttctgatgcaagcccagaagagttaaaagctgcaggtcttggttcaaactatgctcaaaatggatatggaatttatccaacagattcaaatggtgttccatttgatgtaagacctatagcagttatgtcaaatcccgtaaccgacttacatgaggatatggcagctgaacaaaaagcacttgcaacttattatcaacttataaacctaacagatgacgttgatgttatagatgtattaaaattcttaggtcaaagagaaataattcactatcaaagatttggtgaagctttaatggatgcttacgagttagaagaatctcaaaaaatgttctaaaatttttatttgtataactattattatttgataatttataatttactgttgtgttaaaatttataaaaaatataaatataatttattttctataaacagagaaaataaataaaaagcaggtatcaatcaaatagtaacatgtattatactatacattactatcaatattgtacctgctttcatattataagcaataaagaaaaatctatttattaggttttataataaaacaattataaaactcttcttgcatttacatatctacttgaatagtagctactatttatattagatattgttactttttttgatgaacctgaagatgcatgtatcatatctccatttcctatgtatattccaacatgacttacagaaccattatttgaaccttgtgtatcaaagaatactaaatctccacttctaaggtctcctctatttacatatgttccatacttactttggtctctagatactcttggtatactaactcctgcagattttttcataacgtactgtgtgaatccagaacagtcaaaactatttggaccttctgctccccatacatatggttttccaagtagtgtctttgcaaaacttattacactatcagctccttgacttggagaattagtcgaataagatggaattgaagtatcaacagaacctttttcagcaaggtattgacttgacacatatccagtttgattgccataacttacttttgtccatcctccactttcagaaatacttccaacctcagtaccataacttaatgtagctattttagaatgacttgtacctggtcctgttctaacgttcaatgactttgctgttacaacctttgtaccctttacaaggtcatttgaactgttttcaacattttcatttgtagagtcatttacactagttcctaaatatttacttgaaacataacctactctaccattagaacttatttttgaccatccatttgactcagatatgtatccgacttcagtcccatatcctagtgttgatattttagaactacttgtacttggtcctgttctaaaatttaatccttttgctgttacaacttttgtcgacttaactgaagtatcactactttcattgctacttccaaggctatttattgctacataatttccatgcacataacctgtgtttccattatatttaacttttacccaagaaccttcttttcctacgtactcaactttatcacctttgtaaagtttccccattgattcatggtttgtacctggtccttttctaaaatttaccgcattccctgttattgttctgctttctatactcacactctctacttcagactcattagcatatgctaaattccccatagtaggcattattatcgcagttgccattatactggctgctattctcttttgattaaaattcataactttccactcatctcctcttttctactatctttatttcacttcaaaatataaaagaaataattgacactattaaaatatcaattatttcttttatattaatattattacaaatttgtaactatttgtctatagtaatatttgcttaccataaattaccatgtataaattttaatcttcaatagcctgtaatttagtaatatagccatcttttaccttttttaaaaatggctatattttttaacttttttgtaactttttaaaatccagttgagccaaacccaccttttcctctttcggagtcacttaattcttttacttcttctatgttaatatcatagataggttttactatcatttgagcaattttcatatgcttttcaaccttaaaatcatttttcccatgatttattaatataattttaagctctcctctgtatccttcgtcaatagttcctggtgtatttaatacagtaacagaatgctttaaggcaagcccacttctaggtcttacctgcgcttctgtcatagtaggaagctctatacatatcccagttttgataagtttagtctctccaggaggtattacaacctcttctatagaatacaaatccataccagcatcacctttgtgagcaaaattaggtattatagcatcatcatttaatttttttacttttaaattgtacatcttatatctcctttcaactttctataaatattataacttaaatttcgacctcttgaagttttttatttttttgtggtaatataattattagtgttttaaaggaggattttttatgaaacttgtacttgctgagaaaccatctgtggcaaaaactatagcatcatttttaggtgcaaagaccagacaagatggttactttgaaggaaatgattatataattacttatgcagttggacacttagtatcattatatgatatgaaggattatgataaagataaatactctggctcttggaaaatgaacaatttcccatttgttcctgaggataagtttaaatttaagattgatagttctaaaactaaacaattcaacactgtaaaaaagcttttgaatagaaaagatgtagaatatgtaataaatgccactgacaatgaccgagaaggagaacttatagcatttttaatatttttactggcaaaaaataaaaaaccagtaaaaagaatcttggtaaatgaatggacaccagaagatattacaagaggtataaaaaacctaaaagatgaatatgaaatgagaaatcttcaagctgctggatatactaggcttattactgactggttgattggaataaatttcacttctgttgctacattgaaatatggaaatgggaaactattaaacataggtagggtaattcttccaacagttaaattagtctatgatagagatatggaaatactaaactttgttcctaaaacttattatgaaatagaaggacattttaaagctgaagctggtgaatataaaggtaaatatgttaagggtaaagaaagtaaatttgatacacttgaagatgcaaataaaattatagcttcaattacatctgaaactggtaaaatactagataaaaaagttactatgtcaaaggaatatgcaccaaaactttttagtttgacatcacttcaaggatatataacttctaagtattccaattttacatctgataaggttttaaatgtctgtcaatctctctatgagggtaatggtaagggtggatacataacttaccctagaactgattccattttcttagaagaaagtttggcttcaaaagcttctcaaactttagataaattaaaggttggtcttgaatatgaaaataaaattaaattttctaaaactaaaagagtttttgattcttctaaagtagactcccatagtgctataattccaacttatataattccaaaaagtttatctaaggatgaacaattagtttatgatgccataaaagatagatttgtagcaaactttatgcctcctgctgaatatgagaatacagaaattaagactgaagtagataattgtactttcttaacaaaaggtaaagtgcttaaatcaaaaggataccttgaggtatataataaggaagaaaaaaacgatttacttccacttgtaaataaagatgatgttgtagatgtgttagaaataaaaccattaactaagcaaactactccacctaaaccatatactgaggacacccttttaaaggctatgaaaaattgtggtaaaaatgtgcctgaagaagatacaacagtgctatctggatattcgattggaacatcagccacacgtgctgatgtgttaaagaagataagtcaagtgggctatgtaaagaaaaaagggaaatcttattctataacagaccttgggaaaaatttagttgaaatttttcctgttaaagacttatttgatgtagattatactggaaaacttgaaaaaagtttaagcgatattcaaaaaggaaagtatacaagaaaagaatatcttactaatatcattagttttatatatcaaaatgtcaatattataaaacaagatgcttcaaaaaatataaacacagaagcatatactttcgattcaaaaactaaaaaatttactaaaacaaaagaaaaaaaacagaaaaaagatgtaactaatactgaaaaagaagttgctatatcaaaagattctaataacaaaaaagaagttaaaaatggtgatgaaaatcaatctcttggcaaatgccccatttgtcaaggtgatgtactagaatttgacaaaggctttgcttgtaaaaatcataaagaatgtaaatttgttatttggaaaaatgataagtatttaagtctttataaaaagaaagttaacaaaacaatggtcaaaaatattttaaaaaaaggtgaaactaaagtaaaatctttaactgctaaaaacggtaataaatttgatgctacattaaaatatgataaaaatccagataccggctatttcaattggaaaatagagtttgacaactaaatattcataagaaaagaaatagcagtagtataataatctatattatattactgctatttcttttcttatgaagttttaacttttttaatagtgacttttacaatcacactctaacctaatttctttactatttctgataactttaatgtatgttcatctaataaagttagttcctcttcagaaagattagataatttttttactagagattctttgagaatagcttttactgcatcaaataatttaaatgctttatctgttaattcaaccctaagaatccttctatcttttgggtcaggaaatttattgactaaaccatgttccactaatctgtcaataatcggagtcatatttgattttaaaattcctaaattagaagctatttgagaaattgatgatgaatttgatgtcataagataaagaattaccttagcatgtgatggagccattggacattcttcaaaataagctttcattatatcagagttattttgaaacttttttaacaaatcgctttctttaaatatattattttcaagcacaaataaaaaatctaaaaaagagtccgctattttaagtatattgttgttatccatatttgtaacatcccttcaatagataatataataaaacattgttgtttaatatagtataaattataaactattaataaatttaaaacaagaaaaagttattgactcataataattataaatttataatcaaattagagaattataaattgccaataaagggaagttttttaattagtctaaaactaaacttaaattataagacactttaaattctacaacaagctagtgtgcaatatataataggaggagatatgaaaagatatttaatagttttcttaatgtgtagttcactgtttttagttggatgtggaaaaacaaaagaatctgaacctgagaaaccaatagcagtttctgttcaaaaagcagtaggtggagaaattgaaaacacaaattctttctcaggaactacaaaagttaaagatgaaacagctgttactgcacagactgttggcacagttcaagaagtgtatgtaaaacttgggcaaaatgtaagaaaaggagatgaattattgagtataagcagtccagagctagaaaatagtgtaaagcaaagtaaagcctcactagatttagcaaaagcaagttattcaagtgccactggtggttcattagaggcacaagtaaatcaggcaaaaacagctcttgacaatgcaaagattcaatatgaggagtctcaaagaaattatgacaataataagattctttatgaacaggaagtcattagtttagaccaatttaaaaaaatagagttttctttagagcaaacaaaacaacagttagattctgctcaaagagcatacgatacagcaacttcaaaaagtatacctcaagctaaagcacttgctaaaaaacagcttgaccaagctcaagtatcatataatttagcaatgagtaatttagacaaattaacattaacatctccagtagatggtacaataacagctaaaaactttgattcaaaggaaatgataacacaatcacaaccagcttttattatttctaatcctaatatactagaagttgatttaaatgtagcagaatcagatataggtaaatttaagaaagatggaaatgtagatgttataattgaagaccaaaggattttaggaaaaatagattatgtaccttcagtagttgaccctcagacatctttatatcctgttaaagtacttgtaaataatgcaaacaacaaatttaaggcaggtatgtctgcacaagtaaacttaagtattgaaaaagaaaatggtgctgttacagtgcctaaaaaagcaatatttgaagaaaatggtaaaaaatatgtatacatagcaacaaaagacaatatagcaaagaaacacttggttcaaactggaattgtaacagaggataaaatagaaattaaaagtggtgtaagtgataaagatacagtgattattggaggaataagtcttatttctgacggaactaagatatttcctgtagaaaaggagaagtagactatgaatttaacacagacttccgttaaacgtcctctcacaatcataatggtctttttagtattaatagtttttggtggtattggatataaaaaaatgtcaataaatctaatgcctgatatagaaataccagttgtaatggtcatgactacttggacaggtgctggtcctcaagacgttgatgaacaagttagtcaaaaagttgatgaaagtttatctgccgtttcaaatgtaaaatctactatatcaagttcacaagaaagtgtttctatggtagttgctcagtttgaatttggaactaatttggatgaaataatgaatgatgttaggtctaaagttgatgcattacagaccagcctcccagatgatgcagcaaaaccaacagttttaaagctggatatgaatgcacaggctataggtcaacttgtcatatctggaggaaatgaaaatagttcacaagccttaagaaaatacgctgaagatgtaattcagcctaaaatagaatccatagatggtgttacttcagcagaccttaaaggtggagaaaaagcacaggttaatgtaatagctgacccagctgttctttcaaattatggagttagtttatccactataaaaggtgtcttatcctctagtaataaaacattcccttatggttcaattactcaaggtgaggataaaatagttttaagagcaattgataaattagaatccctagatgatataaaacagattcaaattcctgtaaaaggaggaaatacagttagattagataatctttgtagtgtagattatggatatgcagacaaagatagtatttatagatacaatggaaaagacagtttggtaatagatatttctaaacaacaagatgccaacactgtaaaagttatgcagagtgcatacaaatacgtagatgaattgaataaggaaaatcctcaatttaaaattaaaattgctaatgatacaagttcatacataagtgaatcaataaacagtgtaatgagcaacttgcttataagtgctgttatcgcatttattgtaatatttgctttcctaaaaagtgtaagagcttcactagttgttgcagttgcaataccaatttctataataggtgctatagcaattctctactttactggtgaaagtttaaatcttattactgcaagttcattggtaatttcagttggtatggttgttgataatgctacagttgtaattgaaaatatatttaaatataggaaaagtggcagattgagtcttgatgattgtgctattgagggaacaagaactgtaacaaatgcaatacttgcatcaacattgaccacgatagcaatattcttacctatcatgtttacagaaggtatagctaaaataacttttggggcattaggtaaaacactaatagcttcactagcattctcctttataggtgcaattacactcgttcctagtgtatttgcaaaattaagcagaggaaaaaatagtcaaaagatgcaagaaaaagatagtcctatatttgataaggtaagtgaagcatataaaaaattattaagtgtatgtttaagacatcaacgcttagttgtaatatcaagtttacttatttttgtagcttccttatttggaatgggatttataggtatggactttatgcctgcagcagacaagggtgaattatctatttctatagaacttccaaaaggtcttagcctagaatccaatgattactatgtatctatgactgagaaaaaagtctcagatattccagaaattaaaactttaataacaactttgacatcagattcaaataatagtaaagcaagtatagcaattgaattagaatctcaaaaaaatagaaaaagaactactgatgaaatagaaaaagagataattgatagagtggctactgtaccagattgtaaaataaatgtaagtcaaaacagtagtgttatgggtggagctggaggagcagacttcacattagaaatgaaaggtcctgatttagatgtattaaaaatactgggaaaagaagctgaaaaagaatttagctctataaaaggatttagaaatgttgaaacttctcttacagatacaacacaagaagctcaatttactatagataaacataaggctcaagaatatggtgtaaatactgctgaaattgcaggcatgttacgtacagcaataaatggtgactccgtaaccactgctactattgatgattacaaagtggatgtaaacctaaaatttaaagcagatactattgatagcttagaagatataaagcaactaaaagtaaactctgcaactggaaaagaagttcctcttggtgctttttcagatataaaaatggcagatggtctacaatctatatctaggactgatggagatttttctgtaaatataactgctacacttgacaatttagatgctggtactgctacaaaactagcactagaaaaaacgaataaaatggtaattcctaaagattactctataggtgttggtggtgaaacagaaatgatgaatgaatctatggcaagtcttggattttcaatggtcatagctatagcattagtttatatggtaatggtagctcagtttgaatcatttagtaaaccatttataatcatgttctgtgttccatttgcattcgttggagttgtgctttcgcttctagttagtggtcaaagtttaagtactgtcggtatgctaggtataatcttacttatcggtattgttgttaataatggtatagttcttattgactacatagagcaacttagaaaaacaaatcgtaacaatgatttaattggtttggtttcaattggttgtgcagcaagattaagaccagtcttaatgactacagcaacaacaattttaggtatgttgccaacagcactatctcttggtgaaggtggagaaactatgcaaccactagccatagttataatgggtggtctaactgtatctacacttataactttggtgcttatacctactatatacttaatatttgataaatgggaaaataagttttcagacaaaatgcctaaaatatttggtaagataacagataaaataggaagtataaaacgtaaaataataaagaaaccaaaattgaaagctaaagtttaaatagaatggagggtgattgtattgaataaaaaaatgagcaaaatagttgcaattggctgtggtgttggtataataactgccaatttaatcccagtttacgcagataataatacttcttctataaacaacgttgataattctattttaagtgactcaaataaaagaacatctgaaaaggaaattttgactgctagagaagctgttagtgctgcacttaaaaatagtgaaaaattaaaaatgaaatcagaagaaataaaaatgttaaaagaaaagttagaagtacaagatgagtttgatagttttactggaagtgacaactcgtttccatacgaccaaattggacttcttaaaaatcaaagtgaacaggctaaaggctttatggaggaccaaatagcaaatgatattactaataaatttaacgatttagtttcaagagaaaatgagctagataagataaaaaacaatcttgaaataaaaactaaagaaattaaagatatgaaattaaaaaaagatttagggttagtaacatctttagaaactgaatcagctgaacttgaacttcaaacactacaaaatactcaaaaagctaaacttcaagaactaaaaaacaatcaagactattttaagttattgactaatatagatttaaataattatcaattggataaagaatatagatttgaatcttttagagtaggtggctcagttgattcatatatggaaggtaaggttaatgaatatttaaaatacgaccaattgattttagaacgtacagaagaaagctttaatgataaagatgagaacaaagcagatttaccagatagacctaatcttacaagaccagttgctcctacaaaaccagagcaaggtaacctaactgatgatgaatacaaggttcttatggataagtatgaaaaagactacaagagatatgaaaaagaagttgaagcatacaatcttgaaagacagacttatgctgctggccttactacttatgcaaattatcttcaacaaaaatttaataccgaaaatggtctagtaacattagaagacagtaaaaaagctcttaaaaaagggttaattgatagctatgctcaattacttgctttagaagatacaattcagattactaaaaaacaacttgatttatcagaaaaacaattaaaaaatactaaattaagatatgatttaggattaattactctaactgattataaaaaacaagtggtaagtaatcaagatgctaaaaatagctatgacactcttattgtgaattataactcactaaaaaatggtatagaaaaaccttggatacttaatactggaaaataattctggtaaatagaaagattactttaacatacgtttgattaaaaaatagttatgcacactcgtggctttagtcatggaagattcagaaggcaaataatagaaatagattagtaaaaatatatttacttataaaactgtatacttttatagaggctatctcaaaattggatatgtccctgtcaagtagacagacttaaaaaaggctatctttatgcggaatgagttcgatattcaatcgaactcattccgttttttaattgtattctttcattattataaaaataaatataatcatttattagactaatcatttcctttggatctgtagtatcaattaaatatattaattcagatttaaaatgactgaaaaaactttctataggagcattatcccagcagttgccccttcgggacatagattgtataataccattatctttaagccttttagagtaagatctacttgtatattgtgaaccttgatctgtatgtaaaatacaatctttagctaaattcatatttattagttgatttactgttttattaactaatttagtatccatttttgtacttatctcatatgccactatttcaccattaaataaatctttggctacattcatgtataagaattttttaccgataggtatgtatgttatatccatacaaattttttctaatggttgattagctctaaattcacgatttaatatattatcatatacctcatatgatttaaacttacgtctatatactttctttctaataatagatttaattcctagttctttcatcaacctatatactttcttatgattaatagggctatcaagtattttatttaaataagtacaaattctttttctaccgtaagttcctctatattttttatgtatttcaattatataatccttaataattctatctttgatacccctatcggaagattttttagaataacttagccatttatagtaaccgcttcttgacacacctatcaacttacacatactagaaatactatacttcctagacataagtttaattgttttaaatttatcgcttactttgacttgtccaatagggtacttaacttttttaaaaattcattctccatgcgtaagtacttcaattcttcttcaacagatttaaattttctattatcattttctagactaatatttttaaatctgcctctagtttcctcattaaatgcagttttacctttatttttataatcttttacccagttttgaacttgtgttttgcttcttatattcagcatctcagcaattttgtatgatgagtatccttcttttatatataaatttacagcttttagtttaagttctttgctatattttttatgttttttagacatagaaaaacccccttagagtatacgctttttagacttattataatagccttttatttaaatgtctactataaggggattatactaaaatagagataagcctcttttttattgtttaaattataaaaatatatttgattccatacaaaaagagtgccttctgaactaaaaagttcattttgagacaccctcaaaagcttaactctaaatttaattattttttatcaaatgtctcatctattttacatcttaccatgttaacaaattcagaaatattatatcctctaagtttgcatccacatttaggacaataatccagtttcctagataccaaagccctacaactaggttctggacatcttatttttagactctcatctgctactttaaatccacatcgtgggcatatactacctggacgtgatgatacttcctttccacatttaggacactttgtcaactttatcccctccagtaaactcaatttaattgatagttgaaatttctctctacaataatatatgcaatataattaaatacgtttcacttacaactgtataagttaaatttttataataaaaatcccctatattcaatttacaaatacttaatttgatacattgaacaataggggattttatttttatttagttacatattttgcagtctattattatctaggattttttatagatgcttgagctgctgcaagtctagcaattggcactctaaatggtgaacaagatacatagttaagtcctacactataacagaactctactgaagatggttctcctccatgctctccacatattcctagttttaattctggtttaacttctctacctaatttagctcccatcttaactaacttaccaacaccattttggtctagtacttggaatgggtctttttctaatatttcttcatctacatattgacctaagaatttaccagcatcatctcttgaatatccaaatgccatttgagttaagtcattagtaccaaaactgaagaagtctgcttcttgtgctatttcatcagcagttaaacaagctctaggtatttctatcatagtacctacagtataaggaacttctataccttcttcttttattatagcgtcaacagtttctactatcatttttcttattatttttaactcatttacttctccaactaatggaaccattatctctggagaaactttaacacctgctttgattgcttctatagcaccttgtattatagctttagattgcattacacatatttcaggataagttattgcaagtctacaacctctgtgtccaagcattgggttaaactcatctaaatcaactattctcttcttaatatcacttacttttattcccatagattttgaaagttcttctatagtctcatcatcatgaggcaaaaattcatgtagtggtgggtctagtaatcttatattaactggttttccatccataactttaaataactctacaaaatcttctctttgcattggtaatattttttcaagagctttttctctttgttctactgtattagataatatcatttctctaactgctggcaatctagcttcatcaaagaacatatgctcagttctacatagacctataccttctgcaccaaactctatagctgcacgagcatctctaggattatctgcattagttctaaccatcatacatttgtgtttgtctacccagttcattaatttttcaaagtttccagttaaagatacttctgttttcttaacatctcctaggtacacatttcctgtagaaccatctatagaaatgtattcaccttcttttataactacatcatcaagtgctcttatttctttattaaactcatcaacttttatttctccacatccagcaacacaacatttacccatacctctagcaacaactgctgcatgtgatgtcattccacctctagctgtaaggattccttctgctttaaccattccttctatatcttctggagatgtctctaatctaactaaaactactttttctcctttttcatttgcttttactacatcatcagcattgaaataaactttaccacttgctgcacctggtgatgctggtaaaccttttgctataaccttggcttcttttaatgccttatcttcaaattttggatgtaataattggtctaattgattaggctcaattctcatgatagcttctttttcatcaattattccagcttcaactaaatcaaccgctacatttattgctgctgctgctgttctcttaccatttctagtttgtagtatatataatctttcattttctatagtaaactctatatcttgcatatctttataatgaccttcaagtatatgagtaatttttacaaattcatcgaatacagctggcattacatctgcaagagttgatatattttgaggagttcttatacctgcaacaacgtcttcaccttgtgcattcattaaaaattcaccaaataatttattttctcctgtagctggatttctagtaaatgcaacacctgtaccactagtttctcccatattaccaaataccattgattgaatatttactgctgttcctaagttatgagctatatcattcaatttacggtatacgattgcacgaggattattccatgatctaaatacagcctctattgcaagcattaattgctcttttgggtcttgtgggaaatcattttttatttcttttttataaattgctttaaattcttttactatttcttttaaatcatcagttgtaagttctgtatcaactgtgtatccctttgcttcttttactctgtctaatacattttcaaatttatattttggaacttccatagcaacatcagaaaacatttgtatgaatcttctgtaactatcatatgcaaatctttcattttgtgtagcctctgctaagccaacaacactattgtcattaagacctaggttaagaattgtatccatcattcctggcatagagaatactgcaccagaacgaactgatactaataatggattcttattgcatcctaatgttttatttaagtctttttctaaagtagctaaatgctcttctatttcttttattatctctgctcttatactttcattgttaacataataatcattacatgcttctgttgttatagtgaatccaggagggacaggtaagcctatcttagtcatttctgctaaattggcacctttacctcctagtaaagatttcatgtctttgcttccttcaccaaaactataaacatacttagtttccattgttaaatcccccattaatctttttattttaatttatatcatttttattaatagacattattaaatttctatttctttgtatatctttagaccattttctttcattatgtctaaaattatacctgctgtttcttctattgccttatttgaaacgtttattactgggcatccaattcttttcattatctcttctgaataatctaactcctgaagtattctttctaaattagcgtagtttgctttactggacaatcctaaagcttttaatctttgggttcttatctcattcagcttttcaggtgaattagtaagacctattatctttttagtatctatctcaaacacttctttaggaattggtatttctggaactaatggaacattagctacttttatatttttattagctaaatacatactcaaaggagttttagatgttcttgatattcccactaaaattatgtctgcttgaagaacacctctagggtcttttccatcatcatatttcactgcaaattctatagcttcaactctcttaaagtaagattcatctaattttctaattataccagcttctcttttaggttttcttcctgttctcttgcttatttctcttagtatatctgtcattaaatctatacaactaagaccttctctttcgcaatatctttcaacaatactgcataattcttcatcaactaatgtatatacaattaaagcgttttcagcttttgcattctccaaagtttcaagtagtactcctttattaatcatgtatggaaatctttttatttcataagtttcattcacataaaactgagacatacatgcctttgcaacttgttgtgcagtctcccctactgaatctgatactgcatatataattaggtttttcaccagcatacctccttaattgtcaactatttctaagaatagcttagttatgttggtttttgatattctcccaacaactctcatatgatttttgtcttctcccttatattcaacaatcggaatcgaatctacttcatgttctattatttttcttgaagctaataaaacacttgctcctttagttaaagtgactacatttggagttcttgtcattatcatacctattggcattttatttatatcagaacctcctatagttgcttttagcaagtcttttctggaaacaactccacataactcttcattctcatctataataactatactccctacatcagataaaaacatagtgactattacatcatatatactttcatccttcttagctagtacaggcatgctcattatatcctctactgttttttcttttacacttttaccaattaaatttatttcactaactcctgaataaaaatatccaacttttggtcttgcgtctaatattcctgtcattgttaatatagctaaatcagatctaagtgtagcacgagtcacattcaagctggaggcaatactttcactcgttattggttcattttccttaactatatctataatttttagttgtctttcattaagctgaataataatcaccttctttcattgtgctatactttttatcttttcgcatcttatatagtatattatataactatatataccattctgtaaacagattttttattgaatacgatatattttttactaagttctctcgcttaaagatatttattatatattaatgggggatatttctttaattaatagaactatattagtattacagttaatattataatacataattggtcattttaattcattttatattaaaatttttaataatattgtttcaatgtgaatataaaattgcagaactaattcaaaataatttttacgactacaaataacctataatatacttttaaagaaagtatcctaacaagaatatataaaaatttaaaagggttgatttaaaaataaccatcaaccctttttactaatatctatttatattaccatcaaatcttacccaaatattttttcttgcaattgtcttaaatgatataaagtagtatctttttctatctctaccatatcgtaagttataacttcaccttttttaatatcttttacaactttagtctttttacttatcaaaccaataggtacagcattcatagcctttgctacatcgtatttttctatagtaccatagcatgtatatgctccataaccatccataaactcaccttttttcaaatctttcttagctatagtcataacttctgctactagtccagctttaggtactattgtagccttatggtctaagactgccatagctgctgataaaggagtctctaaactacataaatgatatggtctatataatatgtaattaggtccatcacccatacttaaatattttagttcatcattaactgcttttaatttatgggctactactacgaaaactccaggtgctataccatttacaaaatcaactacaccataattatctaatactccaccttcgctttttaatgcatatttcttaggtacttcattaactgtagcttcaataccatgaccacctcttacatcaggcacaaatccagttgcattacacattaaagccatttctaccattgttttagttccttctttaaaagaagctatcatatgaggtgaagctccttttctttctgcttcttctctaactgtatcaggattacaatctaaatctaatttattatttttacctttacctatcactctaacttcaaaccccattgcatctgcaaaatcaaataattccattactgcacctggctcatctcctgcagaacctgtaaatatcactccagcatcatctgctaattttttaagtattggtccaacaacacaatcagtttcagcatttaacataactatatgttttttatttaaaatagagtttaatgctatctctgcaccaattgcaatacccccagttgcatctataactacatctattgacttagttttacaagccacaagaaagtcattacatgtcaatacttttccttcttgtaattttatttctgcatccttttcatttgttacattatctataatttcttcatctattcctgcatcagtaaaagctttatgagccaactccaaatttatatctacaacaatagaagcttcaatacctttcatatttgccatttggcttaccattccatttcccatatgcccagctcctataagagctacttttatttttttaccttcctcttccaattttgcaagttttctgtttaaatctaacataccaattcctcctgttataataattttattttcaaattaagaaatagttattaaatctccaatagttatatctggatttcctatttccacatgtatttctcctggtaaatttacttcacattttccatcaaatttgattgtacaatgcccaatttctctaagagtcttctgagcaatatcaccaactgaaactatacaataatctctattccctatagtaagtgtatctcctatttcaacatcactttttaatgttgctatcgaatgaattacagatatatcctttaagtcgtcatcattaatggtttcatcatatataataagacaattgctttcatccattaactctttaactaaactgcctatcccacttatcttaacttcatatttcatgacattcctcctgataatttatatttatattgagttaattaaaagaaacatttattttttcttttataaattttatagcttgtacaatactctcttcatctttaaatttttgctctgcactatatatatctaatccttctatttcttcaatctctttaaatttagccattactgtacgcccttttaaaatttctccaaactttataaacccatctgaatctgaagatataatggctatacttcctttagaaaaatagcttttctttttgcctgtagacactatatcacccttttttttagctctatttaaagttttaaaatacaatttattctgcttcattataaatatagtatttaaaatataagcaacaaataaaattactaataatttcatatttatacaccttccaaaaatcacattatttttaaatctgtataacaactataaatgctgtacaatagttatataaggtttttaagtaacacctttttaaattctaaaaaagttctacatttacttatcttattcgttaattttacatcttggcctatctttaaaacttcttcataaatttttactaataagtctgagtctatcttattctcacatggaaacattgtcataagaattatttttatacttctatttgcatattctattggttcttctaaaattccaactgccattaaaaacttatctgatttttcatttacagagtgaggaaataataaacctttatcaaatactgtgggagatttttcttctctattgactatattttttctaaacttatcatcaatacatcccaaatccataagatggtccatcattttttctaatgaagcaagtatagtcttttcatttaatatcataaatttatcttcatctaacaaattatttattagtaaatttgtagaattagtagtgtcaatattcccttctcttaggcacaatactgtttttaattgttctcttaatttgttttcatcaaatattgtatttatttttaatactattgtatttatattcgatgtgtctaaatcaatagttgtaaaaactatatcgtattcatctaagttaatatttctcaaattaaaacttgaaagagtatcaattttaggattatttcctatcagtttttctactcttattttcaatagttttgctgttcctagacctgtactacatataattgctattttttttattgaatagaatctactgctatttctttctaaatatccactgaaatggattgctatatatccaatctcatcttctgaaacttctaagttatactttttctctattacttttcctgctatttgtgctaatttaaatggaagtatataattttgcttaatctcttctaacaaaacattttttaactttatattaaataatagcctgtttaaagtaaaactaagatgatatcctagacctactcttaattcatcctcatttataaaaatacccatatcgacatatatttgattaaatatattttccatcaactcatcaatgtttttactaattctactactatttaaagcacattctgatgctggtgcatttccactaactaatggtatagttaaataaataatttcttcatcatttaaagtacattcaaacattcctgatattatatgttttatttccctagcaataaagtattcatcatatgatttaagtaaatcaaactttacatcatagtcttttactttcttttcttcttttactctatagactaaaactactatgtagttaataacttctcttaacatttcatctgtaacataaaaattattttctttaaataaagtcaatagtttttcttctaaatttatgatttcttcttttttgattcctttaaaatactttgaattactgaaatctttccttgagtttttatacaactgatttaatataaacagtctaatatcaagttcatttccatttaatttcatacctgtattctgttttttaatcaagtttaaattatatgaagccaaaactttttctacatactggaaatcatttactaaagtagttcttcctacacacatctcatcagctaaactatcaagtgtaataaatccatctagttctatcaagtaatttagtataaactctactctatcttcttttgaatttaatgaaaatacattttttctattcatatcaataatcttattgagtatctgctcatcttttatttctagtttatagccttgaccctttatatatttgattactgctatatcattacctaaatctttattcaattgttttatatacgtccttacacttctagttgtgacattcaattcatttgctattgaattaatactcacaaactcttttttactacacataatcaatatcttaaatatcttgcggtcaatagaaggaattttctcagttacactcattttgtatctcctccttgatttcattctagtacaaatttgaaaccaaattaatacataaaatttcactttaataaaggaaaatttagtattaatctaactcgataattacagctaattaatagtataaaagctagtctttcattaacaaaaaatcttgactagcttaaatttatatttacaattttattaattaattccaagccttatattgacattaaatattatctcaatgcaaatactgcaactccatatgcaataataacagctattggaccagttattaaacgagagtaaaataaagctggaacaccatactctacagtttctggttctgcttctcccaaacttaatcctactggtacaaaatcacatccagcttgcccatttattgcaaataaagctggaagtgctaaatatgctggtattgcaccaagaccaatttgtgtacctacaagagtccctactacttgagctataactgcaccaggtcctagtattggtgataagaatggaagtgtgcaaattactgatataatcaataatccaccaatattacctgcaagtggagatataactcttgcaatccagtctcccagtccagatgctaaaataattcccataagcatacttacaaatgccataaatggtattacgttattcattaccatttggatagtgtctcgacctgcatcataaaattttgatactacttgccctgccccttgaccaatagaaagtattatgttctttttagcatattcaccttgtgcttttgacttaacctcatcataattatcaggctttctaatagaactcttattttcgcttttattttcttgagatttttgtggcatatcttccccatctacaacacttatacagttaggattaacatctgatacataatattcttctgttataaattttgctaaaggacctgtttttccaactggatttacatttattgtaggtatttttttctttggataaactccacatctagcagttccaccacaatcaataataactactgctacttcttcatcagaaactccagttttaaatccatctacaatttcacaacccagtagttcttttatttttaatgttacttcatggataccaccagcagtcattgatagtatcttatttctattcccttctttttttatatacaaaggacctccccagcctgaagttcccttttctatttttaatattttattctcctccattttatctacctcctaagccttatttgttgctctattttttcttgttagaaaagcatacattttttctgttactatacctcttataaaaattacaattagaccaactataaaataccacaatgccagtgtagtagtttctttacctaaagtagtcaaacctgctgatattcccaaccatacaaaaagttctcctgcatttgcatgtggaaaaagacctgtaattggatgtacaaatgaaactgctgcatcataaaatcctgctttgtgctcttcttttaaaaatctaccaaatgtatagcacataggatttcccaagaaaaatactgatactaatggaagtagaatatatcttgtaaaagagttctttcctagcttagaagcccaattattaactctttcctcaccaattatcttaatcaaagagttaatagctaccattaatacaattagcgttggaagagtacctgaaacaagacctataaattgttctccccctttctgaaacaaaccgataaaccactctgcacctttacttagacctgtaataacgttttccataaaattataacctccctataatatctttaaatttttaattttactgcttaacataaattttacaaattacatcttttttctgtactatatgctaatattgtaaatgtttttttattaatatcattttaatataatatttttgataaataaatacatcttttttcaattttataaaggaaaaaattgtactaattagaattttcagaaatatacaattcttatttcgactatattctaaattcttcttagaaatttaagaacttatttttatttcttttattattaaaattatctaaatctgataaaaataaaaaatagatgctcttttacgaacatctatttcttaatcaaattatcttttagttttcttatagattattttataggtatataaatatcaatttgtgagttcacattactaggacctaaaaatcgttcatcatatacttcaaaatcatctcttatatccagttcttcttttgaacttaaaaaccaagtaccccatatatattcataagttttgtctaagttatctaagctaccagtatgagtaaatatagcatactttccttccttaatagtttttgaaacaaatgaatttggaatcacatcataactattaacttcaagtcctattatctcattaaattccatactttcactaactaggtgtatttcagagattgcttcacagattccaaaaactctctttgatggcaaagtatttgggacaatatgatgtacttttctgaatttctcccacaagtcaggtaatgaattattttctaaaattactttatcctttatacctattacctttattttttctatttcttttataactggtttaatcgttatatttccaacaagatgtctcataaaatctaactctaattttttctttttaccaacaaatacatcaattctattttttctatattctatagggctaaccttgtatatagatttaaatgctctgctaaatgcttccgaagattcaaatccactaccaatagctatatctatcacttttttatcactatataaaagttcttttgtactacttactaatcgtcttttttttatataacttcctacactctcaccaaacatagacttaaataagcgtgttaaatgataataagaatatccagtttcttttgccacatcatttacagttatattttcatgtaaattattctcaatatacattacagctttttcaaaatactttaagtaatccaatatggcacctctcttctacttaaactctttaaatatgtaaaatagcactattttttactatactaaaatattataactaattcaatacgataaataaaaacttttagttgatttatatagcctaattatttagaataattaaatacattttttattcaatgaaatcaaaaaagtcagatggtgctttttcaatatttatgtttatcctctgtgttatagatttaatgtcattttttaaatagtagctctcccatttattctctagtccaccccataaaatattaaactttcctatatttaaatccataactatactttttaaagttccaaaaaaatcattatagtaattacaagataagccatttggatactttaaagacaataaattcattaactctttctctccaatttttttagccttatttatatattctttaattaatttatatctatgaatagaatttttcattgattgtggttctaatttatgaagtttatcaatatgtgtatgattagtagagtgtaaaaaatattctctcttactttctaaactgttgattatatttacttcttttttcccatctaaagtctccacaagtgcaatgtttccagacttatctgcaagcaataaattaatattgtatgcaattggcatatcttttaaatattctaatgcttcatctacatctttgcaattttctaacaaatatctaataacagcccaaaactgtaaacctacaattgctggttttctcaaaccatctgaattgcctacaggaataccacatgatgactgacttacacctaatccacattcattcataccttcacctcttccaaattgcataacggtagtacctatatgtgcatattttccatttactttagttttacataaaacaaaatcctccatattgtgtgagaaatcgaaattacgtgcaaatagtacatgcccattttcagttaattctggtgttaatgcaacttgactacaacctggtttaagataagtcatagtataatataaaatttgattacaattcacttgaattgcatcagcaaaaccttgcaattcttcattaagacctggacaatatttatcaaacaactctatcatctctttttcttcttttttgcttaccagattagatttattaatctgaccttctattatctctggcatattagcaaccaattctcctagtctgtatcctatctcataatttgtaccactcaattcaatatttcttacttctaaagtttccatatgtacccctcctatatatcttataatcgattttatcattcgaattgtaatcattcatgatattttgtgctacaagttaaaaaaggttatataaaaacagataagcctctttttcattgttaaaataataaaaatatatttaatttcatgcaaaaaagagtgtctcataaactaaaaagttcattttgagacactcttcttattttaaagagtataattaaaaatagtctaagttctactcttccttcatttttttcaataactctggattttcaaataaattaaatcctgttaaagctaatatttttataccatcaattactctatcttttgcatatgaatttatagaagcctccaaaaattcttttgtatgtagttcttctccattttcagaaaacttcatcaaaggatgtatacatggcattatttgacttaaatttcccatatctgttgaacctaacattacttgttcatcttcatatattccaaattcctccataatctttgtaaatatgtctaccaaaactttattttcatttaatccttggcaagttggttcaaagtgataaaattcaagttcacatccagtggctattgcagcacctctagcacaatttttcactttttctactacttcatcaaagtaattttgttcttttgcccttatctctaatcttacttttcccatatcaggtattacatttgcagcagttcctgcttctagtataataccatgtattctcgttccatctactaattgttgtcttagtgcatttatattattatatagtagtactactgcatctaaagcatttattccgttatatggcttagctcctgcatgagatgcttttccagtaaatatgaaatctagacctcctattgctataatttcaggtgttacacaagtttttgaatttggatgtatcatcattgctgcatcatagccatcaaatacaccatgttctatcaagtaaggctttccatctccagtttcttcagcaggtgttccaattatacttacttctcccttgtaagtatccagtatacttgaaagagctattccagctccaactcccatagatgcaattaaatgatgtccacatgcatgtccattgcctggaagagcatcatattctgctataaatgctattttaggaccatctccatttttcttggttgctttaaaagctgtagccatacctgccaagttttcctcaacatcaaaaccctcttctcttagaaattctgatatttttttagcagatttatattcttgcaaagcaatttctggttcatcatataaagattgacatagccctagaattttttctttctttgaatcagccacttgtattattctttctttcataccaatcttacctcccactaaatttatttagtaatttttatattttattataactttaatttaactcatgcttatcctcttttaagtatctattttcccaaaactcagcatttcttatatctaattctataggattaaaagttctatcgctcctttttactcccatctttttctgcctttgataatcgtaatatgcttttatagctggtttttttagtgtaaatataccaactaagtttatatatgttaatacacctatacatatatcaccaagtgcccaacttgtaagtggttctataaagcaacacattgctgcacatattataagcataaatctacagacattaattatgtgcttttcatgtttttctgccttaattctagtcactaagtaagatacgttggtctccatcatgtatgagaaggctaataatgttgtaaatgtaaatagtagtaaaactattgctataaaaatatcacctaattgaggatgtaatgtatttattgcactctgtacatattgtggacctggttctacacctggtaatgttgtgtaaacatctgtaacattatacattcctgttattataatcataatacctgtagccatacatattaatagtgtgtctacataaacagaaaaagcttggactaatccttgtttggctgggtgactcacttctgctgctgctgcaccataagttccagaaccttctcccgcttcatttgagtatatacctctttttactccccaagatattgctgaacctaacatccctccaaaaaccgaaccaaatccaaatgcagatttaaacattgtcataatagctcctggaactagatttatatttgctatgattattaccaatgtcataataaggtatgctccacccattataggtactactttctcagcaaataaaccaattcttttaattcctccaaaaattattatacctagtgcaatagaagatgtaactgctattgtcatttttgaaaatccaaatgcttgattcattgctagatatagagtatttgattgtgtgccaggcataaaaaatgtataacttatgattgcaaccactgaaaataaaattgaacattttttccaaccaagacctttttcaaagtaatatggaggacctcccctgtactgtccatcatgctcatctttatatatctgagctaaagtagattctacaaatgcagttgccgaccctaatgtagccattatgcacatccacactaatgctcctggccctcccattgctatcgctacagctacaccagctatatttccagttcctatccttcctgccatagatgtagcaaaaccttggaacgaagatattccaacatgagagctatctccttcaagcaaaagagtaaacatttcttttacatcttttatttgaaaaaatcttaatttcattgaaaaatataatcctatacacaaacacattgcaactaatacaggtgaccaaacaattccattaatggtgttaactaaatcggtcacttaactcaccaccattcattttatatttatagacaataatttaaatagctatgtttcaacattctatataatcttcaactcaatatatctaaaaaatctatcttctatttatattatttttaatccacaagctataagtatctatctctaaaacaaagaatattaatcgatatataaacgtaaatttataaactttttaacgatatgtatttgacaaataatcaaacaatataaattggaatacatgtaatgaaaagcctgaaactgttactatataaatagtaccatatacaattattaatatataattgaatagtatatagttagattttaaattttcgtatttattatgaggtgtaaaattgagtacaattaccacctatttttgaaattcttttaatttaaattaaataggtttatgtaaatatataaatagatgataattgctactcaattccagacctttaggggtaactttatactaaaacctagaaaacttgataacattttggtgtgttgcactttaaattttaagtattgctataaaacttaataatttggtatttttacaatatttatgcttctaacttactttctcttttcttcttaacttttaatatatataaacaagatagtataccaattattagaattgctatctggaatataaatgtatatgtgtaacctttattgccataagtatctatccagtgtcctattaatgcaaattggaatacatctggtgaaaatcctaaagctgcagctatacctatagtagttgctgaatatttaactggaacttttacttcatcttgaactgcatagtatataccttttcccatgtaacctaatatacctactacaaatgttaaagctataaagatagtcattggagtagatgcaggtagtactaggaataaaattattactgctataccaaatacatatattggtagtagtacttttgtaggtgattttactttatctgcacaatatcctccaaatggtgctccaaacaattttagaccatgttgtcttattattgctaatgccccagacaatgccacagaacctccaagtactgatgttatatatggtgtaaaataagacattgtaactgtgaatgaatatacacagaatatgcttattcctactagccaagtgtttggtgattttagtactgtcataaaatcgccagcagacattttttcacttgcttcttcttctttgtcttctctgatatctacatctttaattacaaaccataatactggacacatcactattgataatattcctaaagatatcattacccatctcatacccaatacaggagttgaaaagcatgtataaatatataagaatattgctcccattactacgccagaaactccaaccatagcttcattgaatccataaactttaccttgattatcttttcctataactctaagtatttttaccatagaaggatagttcataactaatgatgtgattgcacaacctacccaagtagcaactgcaaatggatagttcatattaaatgcaaataaaaatgatactactccattaagaaatacagaacctaaaattatctttctataatcaaatctatctgctaaccagcctcctataggagctccaaatatattacctaacccataaattgtaagtagaaaacctagttgagtgtttgtacattctaatgcttttaggattggatcatataatgtatattggataaatggtataatataaactaattcccaagatattgctataataacaagttgaaacattaactttccaaactttataccgttttctttttctcccatatttaaaccctcactttttatatttattcacaagcataattgagttctttttttataacttctgcaagtatctcaacacctttaacgatttgttcttctgacattgttgtatagttaagtctcatagtattttttggaccattatttgcaaagaaggactctccagaaacataagcaactccagcatcaatggctttatccaataaatcatctacatttatactttcaggaagttcaacccatataaacattcctccatctggttctgtatatttagcttcctctgggaaatgtttcttcatagcatctaacattagcagacatcttttcttatactctgctcttattttttctatatgttcatttaagttgtatttctttaaaaattctattacttgtacttgcgaaaattgatttgactgtaaatctataccttgttttaaaagttctgccttatctatgatgtctacattaccacacatccaagcaactctaaaccctggacataatacttttgaaaatgaacctaagtataatactttatctttagtatcaagagatttaagtgtaggtagaggctctggtgtaaatcttatttctccataaggattatcttctattactatgacatcatacttattcacgacttccataaaatcttttcttctttgtaaagaccatgtttttcctgtaggattttgaaatgttggtattacatagattacctttatgttagaattttcagataataatttatctaaatcatctgttaccattccttcatcatcagtatctactcctaaaaaatcacattcataaggtctaaatgcatttattgcacctaagtaacttggattttctgtaactactatatctcctttttctagtaaaatcatagcacttaatgctatcccttgttgtgacccagtagttattataatattttctgcttttgtatcaatattttcttcttctttcattctttttactaatagatctaacaactcatcttcacctttagtaggtccatatgctagggcaaattttcccctttcattaagtactttttgagttatttcacttatctcttctattggaaataaatttgggtcaggaagccctgcagcaaaagatataacagttccaccacttgccaccttctgagctattttcttttgagaagctcttatagctgaagcttttaccatatccattctttttgcatatttcataatactttctcctccttaataataatttcttattgtgatgctaggcacgctaatgctattgaatttatttttatttcagctgtgtcagaacgtgaacctaaaattatcggatttgttgctcctaaaactatacctgcccacttagctttattaaatctaagccatgactttcctaatatattccctgcttctatatttggaaatactaataaatcaacatcaccagcaatattacttttaatacctttatgttctgctgcatgtgcatcaaatgctacatcaaatgctattggaccttccactatacactttggtatttctcccgatttttccatctctacaagtaggttggcatccactgtagattgtatcttagggtctaccatttcatttgcagtaagtatcgcagttttaggattttccatgcctatacttttcatagtaagaagtgcatttgtcattatatcttttttttgatttaagtttggcgatacatttattccactatcagtacaataaagaagtttatgatattgaggtaattcatatactgcaagcaaacttaataatcttcctgttctaagacccgtttctttatttaatatagttctcatatagacacttgtatttactaatcccttcataagaactttagcttccttatttttaactatctctacagcttttttaactgattcatcgggattttgacaacctattatttcatgaccttttaatccaatttctcttgatatactttctattttatccttgtctcctacaagaattggctttataatgtttaaatctgttgctgatttcacagcctttaatacttctttgtcttctgcaacagcaacacttacaataacaggttcaagctttttagcctcttctaataaattattaaaatcttttaacatactctttctcctaaatattaataagtttttgctatttcttctccattaagtactctaagtgctcctagagcaagtgcctccatttccatctctcctggtactatctctattggagctagatatgaaactttttctgctactcctttgactaccatttctgagtgagatatccctcctgtcaagataactctatctacattccctgaaagtgaagctccatacatagaaatttcttttgctacttgataaataaatgcatccattataagttttgccttttcatcaccctccttgattctgttttcaatttctatcatgtcctttgttcctaaataatcgtacattcccccaatcgaacttacttttgcgaccatttcatcatgagtatattttccggagtaacacaattctataagaggatatgcaagtaatccaccactcctttctggagaaaatggaccatcagacctaccaccacttccatcaatcattttgccttgtttatgtgctacaatcgatattcctgaacctaaatgagctacaataaagttataatcctcgtattttccccctagtttttgtgcaatttttcttgaaacagctttatggtttaatgcatgtaaccaacttgctttttctatgtctgatattcctgtaatcctcgatacatcatcaaattcatctacagaaactgggtctactacaaatgattgtactcctatttcatcagctatagttttagctaataatgcacctaaatttgatgcatgttccccatttatttcatttctcatatcctcaatcatttcttcactcacagtataggtaccaccttttatagccttcataagtccaccacgaccaactactgcgtcaaaagaatttatactatgattctcactacttaaaatatctactatcagttgttttctataatcatattcatcaaatactttagaaaaattttttaaatcttctcttgtatgggttatattttttttcaaaatttcattttcatcttggaaaacagaaatttttgtggatgtaccaccaggatttattactaaaactttcaatttaacaccccctagttctactatacagaacgtcgttcttgtattccggcctaaagacttcgtcctattgtccagaacgacgttctatattttattaattaaatactaacatataaaaataagtatttcaataattattttaaatatttaaaatattcattcgtagtcgtatcctgcttcaaatgcttctacatttttagaattgaatttacctttgccttgattttcaaagtattcacacataccactttcaaattcttcttttgtaaataaatccaaactctttaccatagcacctaacatgcaaatgttagcagctttttcattgcctaaattttgtgctatttcagtaacaggtacttttataacattaatgtcttctctgtactttctatccttacttactagtgattcattgacaaacatataaccattttttttcattaaactttcatacttatctactgatacgctgttcattcccaatagtatatctggattttttacacaaggatttgcaattttttcatcacttacaacaacattgcaatttgcacttcctcccctcatctcatttccataagatgggaaccatgtaattttcttttctgccttatatgcaacatacattataatttttcctgctgtaagaactccctgtcctccaaaaccagcacatataatttcattcaacatattatttcctccctaatcaataaattctccaagtggatactttggaacaagttcattttcaattctcttcatagcatctactggctttaatccccagtttgttggacatggtacaagcacttctattaagcaaaaacctttcttttctttttgtttttctagagcttttttgatgtatctttttgttgtatttatttctttagggttagttattgttcctcttgctagatatgctatatctaaatttcccataacttttacaacatcaaatgttgaaccatgatctgcgtaatttctacccgctggagtagaagctgtatattgaccttctatagtagttggagccatttgccctcctgtcattgcaaacatattattgttcataacaaggaatataacattatcatttctagtagcagctgacatagtttccccaagccctatcgcataagctccaccatctccagctattgtaaatatatatttatctggtctaactcttttcatagctgccattgctgcacccattttaccatgaggtggaacgacaacatctacattcatactaaattgaaacatatgattacaacctatatctgaacatataattgtatcttgacatatatccatttctgttaatacttctccaataattctatcgactatagagtgtccacagcctccacaaaacatattttcacacatcattattgctggtgctttcttagccataattaaaatacctcctcttgcttagcttttccatctataatctgttgagcaaaatctattaattgatttacttctgccatatattgagctgttgctactgaatatactggaaatctattatcacatgctataattacatcttccttcatctgtgccatcatgttcatttcaactgttacaagtcccttcaatgaatcacttaatttcttaaatgcttttcttgggtaaggccacaatgtttttggtcttattagacctaatttcattccttttgctctagcatctctaactgcaccttctgctattcttgatgaaataccgtatgccacaaataccacttcagcatcttctatttctatctcttcccatctttgttcatcttcttgaacttttctcattttttctatataccctttttgccatgtatcttggtcttcaaaatatgttatatcagttattactttatttttttctcctacaggtgttccttttgcagcccatggagctttatccatatcgtattctttcattggtggtgctatacaaggttctaccatttgacctattgtagcatcagaaagtataagtactggatgcatatatttttcagccaattcaaaagattcatatgccatatccatattttcttgaacactgttaggcgctaacacgattaaatgataatctccatttccaccgccttttactgcttgccaataattatcttgaccagctcctataaatccatcacctataccatatctttgcacacatgctacaactgctggcaaaccagctgatacccaatatgcaataccttcttgttttaatgaaaatcctggaccagatgaagaagtcatagctcttgctccaagtgcacttgctcccataaccatatttacactggctatttctgattcaccttggataaatactcctccaacttctttttgtctccatgccatcatttctaatatttctgattgtggtgttattggataacctgcataaaatctgcagccaccacgtatagcaccttctgctaaagcttcatttcctttaattaataaactttgcataccttttctcccctctaataaaaataatttataatatctcaaatactaaatcagggcacattgtataacaagcgccacattgaatacatttttcttcatcgactttaatagttacaaagccttttttatttgtgtagtcagaaagacttattgcatcttttttgcaagcttcaatacaaagatagcatcccttacatctttcaacactcaacttgactttttccatttctcaaatctcccctttatgtaatatttttacttaattttaaatatataatatttatattttgtataaatactatatatgcatcaattttgttctatagtatagaaccttgttctatttttattgcttaattaaaagataacacattcgcttatatatttcaataacattttaaattttaagaatatttaattttagattaaagaaaaataggctacatttaaactgatatttacaaataacaatttaaatatagcctatttttattatcgagattaaaaatcatctaaaaagttcagatatactttttgcagtttctataactcttttaatcttatactcaaagtccccttctctcattcttatagttggacctgacaaacttatggctgcaatagctttattatttttatctaagataggtgctccaatacaagttagtccatgttctagttcttcatcatctatagcatatccttgttcttttatttttgctaaaaaaagcatcatatcatcccaattatcaattgtatgttctgtatacttgtgtattggtgtttttctatatttttcaaaatctatagaatcattaaatgccataagacatttaccaactgctgaacaataacattcactacttgaaccaacggatggatttactgaaagtaattgatttgaaccatactctttatgtattatgatacttcttggagaatcttgagctctttcttctaatatagatacattaactacttcgttaaattcttgatttaattttttcgtatatggttttactatttcagtcaatgacattttttctcccacaaccatacctattgcatataaatttattcctagccaatacttaccattctctgcattttgtataacaaaacctttgttttcaagagtaaccaaagttctatgtacagtacttttatatactcccatagccttacttatttcagttattcccatttctctcttttcatgatataacagcaaaattatgtctagggctctatctaatgcatttattatttctcccatatacaaaaactcctcctgcaaatattaagtgctactcccacactctactaaatattatatattaaaattacaaaattatctatttatcttaattatattttataaaacaaaaatattatacttaatttgtaaaataaaaacaaaatactcactatgtccttattattcttacttttaatagaattattctgttatatttttatcctgactagataataatatatatatctattatacaatagatatatttttatacaagactaacaatgaggtgaaataatggataattttaaaaagatattgttaaatgaactacctaattttaaagaatattcttcaaaatttttaaatggagaaataaataaaatgcaatataagggattttctggtggatatggtgtttatgctcaaagagacaaaaaatcttttatgataagacttagagtatctgctggagttttatctcagtatcaacttaataaaatctatgaaatagctattaaacacaacttagataagatacacttaacaactagacaagctatacaattacacgatttatctataaattcaattgttgatatcatggaagaaggaataaaaaatgatatattcactagaggtggtggtggtaattatcctagaaatgtcggattatctccattatctggagttgaccctagtgaagtctttgatgttactccatatgcagttgctactgataaatattttatcaaaaatgctactacataccatttacctagaaaattaaaagtttcttattctaattgttacacagatactgctcattgtagtatacaagacttaggatttgttgctactttgaaaaatgatgaaccatatttcagagttttcttaggtggaggtctaggtaaacaacccaaagttgctttagaacttgatgaacttataaagccgaaagacgccttatattgtgttgaaggtatgattaaattctttatggattatggaaattatgaaaataaaaacagagctagggttagatatatggtcgaatcacttggtgaagaactattcttagaaaaatttaaagaatactataaattagaaaaagaaaatggtagtcttgaactcaatattgaagaaatagattactctaaacctggagttaaaatagatatacaagattctagactaatacctcaaaaacaggatggtttatacactgtatatatacatccagttggaggtattttgttaacaaaggatttaagtactttacttaaagaattagataatgttgaaaatcctatgattagactaggaatgacagagggattatatattttaaatttaaatggaaatgaagcaaaaagaatattagaaataagtaaaactattagttgtaattctcaattagaacaaagtatatcttgcataggtgttccaatttgtcaaatgggcatacaaaatagtcagaaaatgttacatgaaatcatagattattttagattacaaaataatgaagaaattttaaataaagcacctaagttatatatatcaggatgtttaaattcatgtggtgttcatcaagttggtagcataggtttatgtggtaaaaagaagaatgttgatggtatatctacagatgcatttgaattatttgttggaggcagttttgaaataggtaagactagattgggaaaatcacttggagattttaaagctagtgatattcctgaaatgctttataaaatatcggacgcatcatcaggcaatttttatgaatgggtaaattcaaatgataatattttaaacaaaataactgataagtataaaatataatttattatatttacttacaaaaagcatgggtgtctcaaaatgaactttttagtttatgagacactctttttctatgaaatcaaatatattttcatcatctcaacaatgaaaaataagactatctctattttgagacagccttatttcttataaatagtttaaattttatttataaacaattttagataaatcacaaatttctagcatagtatcatatacttgtttaagtaaagcaagtctattgttcttaatagcttcatcattatccataaccataactgtatcaaataaattatcaactactggtcttaaagatgcaaattcatctaaagcaataccatatttcttatcctttaataattcattaacttttacctttacttgtttaaattcattgtaaagtctaatttcagcatcttcttttaataaagattcatcaattttatcactttctgctttttgagctagagtagaaactctattaaatgcagtaagcatctccactaattcatctttttctagccaattattaagctctaaagctctcatatgcatatcagaaacatcatttatatcagaacttaaaacagcatcaacaacatcatatcttattcctaaatctttaaatagattttttactctctcattgaagaaattcattatttgctcaacaacttcttctttattaaaatctaattcagaataattatctaaagcatgttcaataagtacttttatatccacagcaacttttctgtccataagtatactaagtatacctaaagcttgtcttcttaaagcatatgggtcttgagaacctgttggttgtattcctatagcaaagaaacctgctattgaatccaacttatcagctattgataaggcaacccctgcattagtcttaggaagtatatctcctgcaaatcttggaagataatgttcaaaaatagcttcacttacaacatcattctctcctccaacttttgcgtattcttttcccataaaaccttgtaattcatcaaattctcctaccattccagtaactaaatctgccttagataatttagcagcccttatagtatctgccttttcatctactaaacctaaactatcaagtatatcagcacttaatttttcaagtcttaaagttttgtcgtaaatagttcctagttttacttggaatacaacagtttttaatttttctatgtagctttctaagtttctcttagtatcttctctatagaaaaataaagcatctgcaagtcttgcttctaaaactttttcatttccagctttaacattgtctattctgtaagaatcaccatttctaacagctataaagttaggtaacagttttccttctttaagtactggaaaatatctttgatgttgtttcataggagttataacaacttcttttggtagttttatataatccacatcaaattctccataaaaagcagttggatattcaactaaataagttacctcttcaagtaaatcttcatcaaattcaacttctccacctaaagaatttgctacttctatacattgttttcttatcatttcttttctcttgttttggtctaaaactatataatttttttctaatttttcaaaataatcttctatagaatcaacttctattgtactttcacctaaaaatctatgaccttttgttacattagaagatattattccttctaaatcaaactctaatactttatcatttaacaatgcaactatccatcttataggtcttgcaaatttaagattttttcctccccaacgcatagcttttgggaatactacagattttatagtctctggtaatatgtcttttagtacttctgaagtttcttttccatcttgctttatagtcgcaaatatatattcttcttttccaacttgtttaaaatatatgtcagattcgcttaatcctttgctttttataaatcctaatgctggttttgttaaattattttctgcatcaacagcaattttcttagcaggaccctttatttcctcttctaaatcactttgtctatcactcaatccttcgactactaaagtaagtcttcttggtgtcccatacgcatttattttatcaaaagctattctattttcatcaaataatttactaagattgttttttaattgttctagtgtactgcctacaaatcttgatggcatttcttcaacaccgatttcaaataaaagataatttttcattatttgtcaccgtcctttaaaagagggaatcccatttcttctctttgttttacaaaagtttctgcaacagtctttgccatatttctaactctacctataaatgaagctctttgactaactcctattgcacctcttgcgtccaatgtattaaatgcatgagagcattttaacacatagtcatatgaaggtattacaaggccattttccataagtcttaatgcttctttttcatatatatcaaacagattaaacaacatatctgcatcacataattcaaatgcgtacattgagttttcatactcagctttattaaatacttcaccataagttattttatcattccattttaaatcataaacactatcaacttcttgaatgtacatagctaatctttctaatccatatgtaatttctcctgtctcaagctcacattcaatattacctacttgttgaaaatacgtaaattgagttatttccataccatctagccaaacttcccatccaagtccccaagcaccaactgtagcagcttcccagttatcttcaacaaatcttatgtcatgctcacttgggtcaattccaatctcttttaaactttccaaatataattcttgtatattatctggagaaggttttagtataacttggaattgatgatgttgatatagtctgtttgggttttcaccatatcttccatctgctggtcttcttgaaggctctacatagcatacttgccaaggctcaggtcctaatgatcttaaaaaagtattaggattcatagttcctgcacctttttcaatatcataaggttgcatcatgatacaaccttgctttgaccagtatttttgcaacgccagtatcatctcttgaaaattcataaaaatccctcctataacaataaagcctctcgtctacacgaaaggctattttaatagttcttctacaacttttagaatatcaaattctataaaatttgtcaatgttagtgataattcttataattatcttctcttcattttttaaaagtcactttatatctatttattttcgtcttcgtcttctttattcttttcagattcttctttcataaggtcagcagttacatctttgtcatcttcttttttgtcaactactacatccttcacatcttttgctgcattagttatcatattcttcaaaacgtgaagtttttcttcattcaattcacctaaatctacaatttctccatcttcttcattttgaacttttatacgatatttacttataacagcagctgataatccaactaaagtagctaatggtacaaaagctaatccaacaactccaactgttaaaggaatgttcatcatagtttttccatctttttcaactattattctcactacactactttttctaagaagctcttttaattgaaactttatattttctccatctttgccaaatacttcttccatagtttctttagcagattttgctttacaattacaagtattttttttattttctaaatatattactgcctcaattacatctccattgcacattactaatgcttcttttgcttctgcataagttgctcctggaactctttcaaagactgaatcaaccatttcaatagttatattactactcatcattatccactcccttattattttttacactttgcaatacgtgtaatgatttaaaattaatattatcaacataaactttcaaatacttgtctagaatattctcaagttcatgtgttatatattttgatactttagctttactacatgttaaaatatcatttcttaatacatattccataagacttatagttgttaagtctaattttatattattatcaaaaagtttactacacttactacatagtataccaccttcgtagatattaaacacagaattttgtaaaattttacattcacaattaatgcatttatttactataggtttaaatcctatatagtctaaaaattttaactcgaatgctgctgttataaacctattgtctgtattatcctgtgtatacaaatacagagtctgcgcaagtaatataaatagcctattattagtctgattttcaagtatagaattttcaactaattttgtaatatatgtagcataagaaaatgcctctatatcataggatatattataaaaactttttattatttcactttgagtaaccttgtacatattaccttgtttttttaaggtaaaattgctataagaaaataattgtgatgatgaaagcaaagagctcttattttttttagctccttttgctattgcagatacttttccaagctttcttgtaaatagtgtaagtattatgtcactttccttataccttatagctttaagtactatcccctgggtgttcaggattatcatcgtcttcttttttctcccttacttcttcaatttcttcatgtatgtttttgcaatcacagaaatataaatatgcatctatactacctgtttttttaaaaacttcccaactgatattgttcatttttaaaaaacccccttcttacatttatacttatatttttagtaagaagaggataaatcatacataaagttattaaacaatttttgacaataatgccgttgttattataaagtaaactgctataccagttatatcaagagctgtagatataattggtgatgaaactgtagatgggtctgcatccattttttttaataaaacaggcataaacgcacctattgttgcacctaaaaccatatttataaataatgatattgaaacaattaatacaatgtctaactttctcataacaaagtaaattacaatacctgttattatactacacaaaagacctgtaataatacctacaataccttctctaaccacattgctaaaatttaaatccttattagataatgttattactgtaacagatgatgattgagttccaatatttccacccataccaattactacaggtataaaaaatactaatggagcatatacaggattcattatatagtctaagttagaaagtattaacgaagccaacaaccctccaaccaaggtaataattaaccaaggtaatcgtcctctaagtgctgatattatttgctctctcaatgtagggttttctttttcagcaacttctctttcatgttctgaacttcctgcaaatttatacatatcttcagttgcttcttcttccattacatcaattatatcatctactgttattattccttttaatttttcttgtctgtctactactggaattgctattaaattgtatttagatactaatcttactgcttcttctctatcttcatctacataaacagagattatattttcactcatcaaatcttctactatatttgcgtctctagctattattaattctcttaatgacaatactccaactagtttttcttcatcatcaaccacatatatataataaatagtttcagcttcttcagcttcttctctcatatggtctatagcctcaagagctgtcatatctttatttatagaaatatatccagtggtcattgttccaccagcagaatcttcatcatagaatagtaactcttttacataatcggcattctcttgattcaaaagatttattatgtgttctctttcttcttcttcaagttcactcaacttgtctgccatatctccaagagacataagttcaagtatatttttcgagtgttctacatccagtttagataaaatactaataaaaaactctacactaccttcttctaatatagaagatgccatatctaaaggaagtacttcaaataattgaattttcatgtcttcctctaaattttccattatatcgaatatatcaattatatgatattcctctattaattctcttaactccaatactttattattatcaattaatgattttacttcatataataaatcttgggaagcatccagtttcctatccatataacccacctttatttatcattatatccaaaattatttatataattttgtaaatttctccaattttctttgactttaacccataattgaagatttatttgtgaacctaaaagcaattctatatcttgtcttgctgacttacctattccttttagtttcctaccattttttcctattattattcccttatgtgaatctctttcacagtatattacagcagatacatctactatttccttatcatttctcgctttcattttttcaatttcaacagctacaccatgaggtatttcatcattaagatagtgaagaactttttctcttataagttctgctattaatactctttctggctggtctgtaatcatataatctggaaaatactttggcccttcttctaaataattttgtataacttttattaaggtatccgtattctttccttttaatgctgatattggtactatttctttaaaaataccttctctatcatacattttgattatatcaaatagctcatctttttggtctagttggtctattttgtttacaactaaaattattggtgtcttaacacttcttaaatcctctattatctttctatctccaggacctatttttttagaatcatcaactacaaataatattaaatctacatttttaaaagcttctgttgctgcctttaccataaattcacctaatttattttttggtttgtgaataccgggtgtatctaagaatactatctgcatttcttcatctgtatatactgcttgtattgtatttcttgtagtttgaggcttatcactcattatagctattttttctccaactacattattcattaaagtagattttcctacatttggtctacccactatactgacaaaacctgatttgaacattaactgtctcctaactttttatcttcttgttttaattacttaaatttatttatacttttaaatttattttaaatcatttccagagaaatagtttggcaacaaatcctttatactatgctcaaacacctctcctttagtatatcccgttattatttttatatcagaaccaaactctataattacctgcctgcatattccacatggatatgtttgctcattattttctgagttatcacttgctatagctattttatagatatccttatcaccctctgatattgctttaaaaatagctgttctttctgcacaatttgttccacctaatgatgcacattctatattacatccagtataaactttaccactcttagttaaaagagctgcacctactctaaaacctgagtaaggagcataagaatgttgtctggcatcttctgccaaccttaacaattctatgttatccacaacaactcctcctgtatacaataattaaaagttatttttatttaatactctacattatatcataaaaatttaattagcacagatttgttttattttaaatattttatgtacatttattttaattatagaacattccaagctgaaatactaatatagctatcaacacacctaataaagctccagcaatagtctcccaaaaggtatgtatttttccttcaattctactttgggcaactaatacagccattatatatgcaagagtagaggcaacaactctttcagtcataagtgtaattgcagttgctatagcaaatgctaaggcagcatgaccacttggcattcctccttttagaggagtacctgtagaagtcaatgcttttacaactacaacagctataagaaccaataatatacatatcaaggttatatgtaattctgattctcttattttataaattaatattccagatatatctgtcaatttatcataaaacaaaatatatccaactactactgaatttagtgctgccactagaacgcctccagctgcaacatcttttgctatcttagcaagaacatgatattcatcagttactaaatcaacagctttttctatagctgtattaaacatttcggcaactacaactaagcatatggacataagtaacattatcatttctaattttgaaaagttaaaaaacaaacttattataagaacagcaactgaacctaaataatgtattttcatatttctttcaaatttaaatgtatacaatatcccttctatagctgcattaaatgctttaattataccttgacgagttttttctggtttcataaaaactactcccttgttatgtttaacttatttaatatgtgttcttctttttctctcatttcttttgtattttcatctgtatcgtggtcataacctaaaagatgaaacatactatgacatattaaaaaacatacttctctttcaaaactatggttatactctatactctgttctaaggctctttcaagagatactactatgtcacctagggattcttcttctaactcaacatcctcaaaatcatcacttaaaagaggaaatgataaaacatcagtcactctatcaactcctctatattctctatttaattcatgaatctctttattatctacaaaagaaagactcacttcataattatcatcatatccttcataatctaaacattctatgattatatcctttatcttttcaattaactcctcacttacttctaatttatcttgtctatcatctagtatcaaatccattcactacacctactttttattcattaataatgctatatatctatattactacacttttactttcttttgaaagtcttttcctgcattttcacttttttacgttcttcttttttaaattcttctcttttgtcgtgcttctcataagctcttattattctctgtaccaactcatgtcttacaacatctctatctgttagcattatagacccaatacctggaacacctttaaggatctctgtagcttgtattagaccactcttcttattttgtggtaaatctgtttgagttacatctcctgtaactacagctttagagccaaatccaagtctagttaaaaacattttcatttgttcagaagtagtattttgagcttcatccaatattataaatgaattatcaagtgttctacctctcataaatgcaagtggtgcaacctcaatagtacctctttctaaatacttattaaatttatcagcacccaacatttcaaataaggcatcatatagtggtcttaaatatgggtcaactttgtcctttaaatctcctggtaaaaaacctagactctctcctgcttccacagctggtcttgtaagtataattctactaacttcatctcttttaaaagcttttactgccatagcaaccgcaagataagtctttcctgttccagcaggtccaacaccaaaagttatatcattattttctataagttttatatattctttttgacctaaagttttaggttgaacagcttttcccctttgagttatgacgattgtcccctcaagttcttttattttttgttcacttccttcaagcaaaagagataatgaataagaaatactctgcttatctaaatgcttaccatttgatacagtttggtgtaattcattcataagttttaatgcagaatctacatttttttcttctccaattaaaattatattgccttctctaagtattacatctatatttaaagtcttctctattaattttacattttcatcaaagttgccaaataactctctttcaaagttaccatctgctattgtaaatttcttttgtattatcaattgaattagtcctcctaagattttaagtttaattttattagttgttattgctattattattttgactattattactattttgattactattattttcatcagaattgttttggtctttattatccttattatcctcatcaaactcatttcttatatcatttaatggtcttttttctggattggaaggaacttcctcttcaccttcatctggtttactttcttcctttataaacctttctgcttctgacttactaagaggataaattttagcaatattttcactagtttgaactgttattaaatattctaacatatttttattaaccttaaagttatgttttacatctattattctagccgaagctgggattatgtattctaactcttttaaagctttttcagataattctttttttaactcttctttattcctttttacttcaaccttttttgtttcataaaaagtactcgtttttatctttattggaaaagtatagtttcctattgatagttttttttctttattttcaacaacataatctttatattttatattttttctcattgtaaactctttatcataaaaacttagtgtatatatatttttcttttctccagtttttttatttacagtatctacataacttgccttttttgtggactcataaaaagtacttgcccatacttctggtattgacttggtattagctccatttaataagacatctcccttttggactatgtctccagatttaataactgatttaccacttctagggattaccttttctattataccattttttaaagcaattacattacaataatttgattggtctgtagattttagggattctgccttttttgtaacagtaacaaatatatttgttccttttacattgatagataaatatgccacatcattaaattttgacatcatatggtctctaacttcttttctatcaatactcttcttatagactcctggtcttactccaaccttataaagctcatttctaagagcttctttttttataccttcaggagattgtatatatacatctgtcacaaactgcgatgtagacatcaataaaaataaagaaacaagagcacaaatccacatacctttgtgcttataaactcttttgataataaaagggaccccagttttttgctttacctttatatcaaacttacttcctctataaacattcttaaattcttttatatcttgtctatctatatgaaactccattttagtattttttattctagttacattgtaaacacttatcccatttcttataagatgatttaaaaattgttcgagtcctactccttccacaactataacatagtatccccttataaaacttatcaagtgtatctcctcctaatcaacatactcaacattgtagataatcccttttatacctatctcactatcagtaatatacttaagtgaaagtttatccccagatattttaattgttttaactttagtctttattcttattaaatcaacttcatattctaatattgatagataattttctatactaataaacgtattacttgtaacagtaataactggttgatttacttgtaaatcagtggatatttctaacataagcattacccccttaattaattttatgcttgaaataggtatttatgcactttattgatgttgtaacagattagttttaaaatttttatataataaatacctaatatctaatatattatttaaacaataaaaaggtaatcatattgataaaaaatcaacatgattacctttttattttttcttatataaaatctaaacgtatacaatttttattaatcttgttctattaaaccatatccaccagctttacgcttatacactatgtttatttcaaaattatcttggtttctaaacatatagaaattgtgtcctactagttccatttgaagtatcgcctcctcagaactcataggttttacattaaatttctttcttctttctattactatattttcatcttcttcatcatcataatcataatcatcaaattcactgctattatctataaagtcaagattttcaaatcttatgctcttattattttgaactttgtctttaactttagttttatatttgacaacttgtctacttaatttgtcacaaacaatatcaattgctgcatataagtcatcttctacatcttctgctcttattatttgaccgttaataggaattattgtaacctccactttttgtctatcctttttcgcacttactgttactttcacttctgattcaggatcaaggtatttttctaacctacttaattttccatctacgtatccttttattccgtcagttaatttcatttgtctcccagatactattatttgcataaaaacctctcccttcaagcctttccaattctaatactttaatatgttaatctttaaatacaatttttataaatttattgtatttaaattaatattattgtatatgaaaatgattatttttaatagtctatttatttttcgtttgttatgatattattaaaagtacagggtaatttacaaaatctttacattctatttattaataaaccatataaaatagttcaaaaatcctgcataaacaagccacattaaataaatcaaatttatgtatccagatctcttatctattttagaaaacttcgaaatcattattatagaaaccaaaatcattattattatatctatcaaagctgtaaatctaagtccaaatccaaaaaatagtatactccaaataaagtttaatacaagttgtaatccataataaaaaattgcatctcttaccttaggtaagttgtaaccctttcttaatattaggtatgaagatatacccatcaatatgtacaatatagtccaaactataggaaagataaaagctggtggtgcaaagcttggctttgtgagttgtaaataataggttgaaatatctgttccactgataatcattgttaagatgctacttaagtaacctattattagtggtataaatatgtttatcaaaaaattcctaatctcttttactgatataatcaaatttttccccttctttcaaaattttctttgattatagatatgctcaaatatgactcgttattcccaaaaactataaaaagcctagagatttctctctaggctatatcaatctattgtaagttttgttttaccaacttatttataagttttccgtcagctcttcctttaacttttggttggataactgacattatttttcccatatccttcatagaagttgcccctacttcggatatagtagattttacaatttcttctaactcttcttcgcttaattgttgaggtaggtactcttttaaaacttcaatttcaccttctgtttcttttattaagtcttctcttccagctttttcaaattcaactaatgcatctctacgttgcttcaattgttttgctattacatcgataattccatcttcatcaagctcgaccctattatcaacctcatactgctttatagaagctcttattaaagttactacagattttctcactgtatctttgtttttcatcgaagatttcaaatcctcttgtaacttttgcttaagggacatccccttcacctctttattcttatttactactatttcttagcgttttttcttcttgctgcttcagcttttttcttacgcttaacgcttggcttatcatagtgctctctttttctcacttctgacatgatgccagacattgcacattgacgcttgaatcttcttaaagcgctgtctaatgtttcattctctctaactcttacttctgacatttctttttccctccctccaatagcgcaattatgctgggactgtaactatgttctttttgcataatatgcattacaacctaacactttgtttattataaactaaatttttacttttatcaagtatttttatcaagaaggaactcaatttttcaataatttagtttagttttgtcccgcttcgtaattaggaagctttttaccagctaaaatatgatagtgcaaatgtttaacttcttgccctccatcacttccacaattatttatgactctgaatccagtttggtcaaaacctttctctttagctattttattaataacaacatgaatatgtgacacaatgtccatctctttatcaggaatatcaattaaactatcataatgttttttaggtacaactaatatatgatatggagcaactgggttcaagtcattaaaagctaagactctatcatcttcataaactttagttgaaggtatttctccgttcgctattttacaaaaaatacaatccattctttccacctcctatcttataaatattataatttctacatgttatagcaaaattccttctacatattcatcttttacatcatttattttcacttttaatatctgaccttgtatatttttgtcactttcaacaacaactcttatataatttgaagttaatccctcatatttattgccttctatattttgttcaaacaaaacatccagctcacggccgataaatttagttgcaaatttattaaaatttactttacttaaatttaaaagttgttcacttctaaagtgtttcatttgagggtcaacttgattttccatagttgcagctggagttccttttcttggtgaatatttaaaaatatgcatttgtgaaagctctatttcttttaaaaactcgtacgtttttttaaactcttcatttgtctctccaggaaaacctactattacatctgtagttattgccacatctggcattttacttctcaatctatctacaatagttttgtactctaaagttgtgtatcgtctattcattctttttagagtttcatcacatccactttgaagtgataaatggtaatgaggacaaactttatccatctttaaaacttcatttacaaattcatctgtaaataaaattggttcaacagaactaagcctaattctttctattttttctatctggtttatttgttttattacatcaagaagtttaatatccctatcctttaaatcttttccataagaggcaacatgtattcctgttaatacaacctctttatagccattattagccaattttttcacttcatcgactatactatcaatatctctacttctaacgcgtcctcgggcataaggaatgatacaataagtacaaaatctgtcacatccatcttgtattttcataaatgctctagtctttccattagtttggctgatttctatttcttcaaaagctttaactttcattatgtcatcaactgtactaactttcttacttgaatttatctttttaatttcttcaacaatctttcttctatcatttgtacccatgactaaatttacttcttctatatccaaaatttcttctggagatacctgagaataacatcctacaacggctattattgcatctggattcttctttttaactcgtcttatatattgacgagattttctatcactcatatgagtaactgtacatgtatttataacataaacatcagcatactcttcactattgacttgttcataaccatctttctcaaatagttctagcatagcttctgtttcatattgattaactttacacccaagtgtataaaaagctacttttttcaatttatttttctcctcctaaatcacttagttcatacaaagctattgttgatgctacaacagaagctgtctcagttcttaatattctaggccccaatgatacaacattacaattatttttttgtatttgctctatttcttcttcagaaaatccaccttctggacctataaaaattccaacactatctatattagaatcacatttttttagtgcatgttttattgaaactgttctttcattttcataagggcaaatatttacattattttttttcatatcttctaaagcttctttaaaacttaaaacacctcttaattttggtatcttacctcttttgctttgctttgctgcttcataaattattctttcccaacgttcaaattttttatcttcttttttgtcatcaactttaacaacacttctcttagtttgaactaatattatttcttctacacccacttcagttaatttttgaagtatcatttccatttttggagcttttggaagtccctggtataaccttactttaagttctgattctctatttatatcaactttttctaaaatctctaaattaactatactcttatctatattcattatctcacaaatatactcattattattcttgtcacatatttcaagtttctcacctagtttgcatcttaaaacttttgaaatatgttttacatcttcaccttctatagtgcaagttttatcttgtagatttatattatttttttcaacaaaaaatctatccattatacgtcaccatatcccttattttttaagcttagaaactattgctgaccattcacctaatttttgaacttcaactatttcaaatccattttcaattaagctttctttaacttcttctactttatccaaaattatacctgaagatataaatatagcatcttctttcataaagttttgaacatcttttgcaagtatctttattatatcagctattatatttgcaactattacatccgctttatcttttattacatcagttaaattaccatgcattacagatacacttttttcaactttattttcaagaacattttcttttgcaacttttacagccacttcatctaaatctacagctacaacttcttttgctcctaatttagctgctgctattgcaaggattccactaccacatccaatatcaaatactttagaatctttattcacatacttttctaattctctaatgcacatactagtagtttcatgtgtccctgtaccaaatgccattccagggtcaagctctatgattaaatccccatcttgcatagcataatcttcccatgtaggctttactactaccctttgtcctacttttgttggtttgtagtatgctttccatgcatttgcccaatcagcttcatttacttggtccaatgatacacttccttcacctatatctataccaaaatcttttaatcctaaaactttttgctttattatttcgacaaattccatcacatttttttcttcagaaacataagtttttataagaacatcatcttcttcattctttttaaatacttcttcttcaacataatcccagtctagttcatttttcttttggaataaaaagtcttttgggtcttctattacagctcctccagctccttgttcatatagtatattcgttataggttcaactgcttctgttgttgtttttatagttacttctatccaattattcataagtttacctctcttctctatagtaatattcctgtttttccataacttttattatatcataaatataatattttgttgttttatattattggttttaaattcaagctaataatatccttatataatagtcagaatatttaaaaatccgattagttaattttaaacctaataataaaacttctattatatctactatatcaatatttgaaatccacttagttaatcttaaacatacaaaatctccaacttataattattttcgcgatgtacctgaaacccacttagttaatcttaaacctcaaatttattatctatatacacttgtagacactctatctcacaacttatttttccttttaaaaaatagtttttacagtgggcttacagtagtactttttgtattttcaatgtctaaaggtatattatatttaaacatatgctcacttcaaaattaagcctacagtactattatactcaaacttactactagattttagtaccatgtatccttctactttgcttattaatccataataatataatctattaaatataaaccctgatacttgaatcgaatcttgttgtaactccctatcttccttataaaaatcttcttccagaataattttgtaactaacatcaacatctctaaaaattttagctgcttccttcttactatcaacaatatttttgtaaggttcaaaattaaaaattaaatccaatccatcaaaaatttctttatttataccataaatattcttaatttctttatcacaacttataaaattctcttcaaaatagtttttaactacactattatcatagtaatcatccaaaatagtttttctaatccccattgtaaaaatagagttagtttttaatatgtcctttaagatgtttttagttgtgttcttaagtttgttatcataaattttatcttcactaggtagaatataaaagtttccatattcatatttattatttctattgcatctacccattctttgtattaagctatccatagttgctaaatcacttattattatattgaaatccaaatccaaggatatttctactgattgagttgatatccaaatatcaccctctccatttaatattttactatatttctcttttttatctttgaacttaaatctactatgtaaaacatctatatctacaccaccatacttatcagataaattttcttttaaaaactcatatgttctattgactgaatcaatagtattctttattataagaattttttgtttattttctaaagcaccttcaactattgacttgatttctttttcctttataaaagaaacctttacatctttaccttcacaaatttcttcttccttgttgctctcaataaaaactatttctcctttatcagtaacattttcattactttcttcttgaaaaataattcccttgtttatcatttgctctttatatgattttggaagtgtagctgtcattaagtgaaaatcaacatctaagtacttgcatgcaaactgcataaaatatatcaaaatcaaaaacatctttggttccaataaatgtacttcatcaacagttatagatgcattttttacggctgcgaatattttttcatatcccggaaatttaaacatactaagtaataactggtcaactgttgcaattacacaaggtttacaaaaatttatactcaaatctatatcccttaatgtcaatacaaaatcatgttctccattatcttcattctctgaatataagtttatatctccatgaagtaatccaatgtaatcattactacttcttgtatctaaatcatttttattttgaaaaatattttttctataaaaactttctgctgatattttatttggcactaaaaagaattttcttttaaaagtctttctataatctgcagctgtttttcctgaacctgtaaatgcaacagtcagaacatttcttccagaaagttctctcaaccttttttgtatagtattgaactctatattatttttttctaaattaccctgactcttatatatctcatttaaaatcatatcatcaatttcttcatcagtaaaatcgttataaaattttatacctttctgtctacttgatgcactatggtctattaagttcagcatccctttatataaaatatacttaaactttctataatttaaaactgaatcatctatttgaccattgttataatcactgtctataaacatactttcacttaatttatctatgtaatcataatccaatacatcttcaccaaatttaaaatctacatttaaaatgtcatttatataactttctatatctttcagattaaactcttctttttctaaaatgcctttttcaatataatcataaatttcttcttgaactttactagtacttaacctcatataatcttcatagtttccatgatgtaacattatacttttatatatatataacttatcttcttctaacaagttcattttttctaatatatcttttaaaaatgctccagaaaatatattgtgtcttgctatcttttttaaagattttttgtcagactctaactttttcctctcttcttctgagcaactatacgatattttattattaatctccattttttgttgcataattgaattaatttttcctaaatcgtgcaaagcacaacatatttttagtatctctacatctttatctgaatatagatttagttctaatatagattctaatacttcaaataaatccttaatatgttcaactaatgtttgttcttgttgattagttcttaaattatatgacttagctaatatttctttttgcatgatatttttcatgataaacacctatctttcaaaataatttaaagccatgtaaaaacttcttttgtatcaatacatacattacatacatttaccttaatatttttaggatatataccatcattatcaacatatatataatggcaaaactcataaactctatcatctctatttgcttctaaatctttatatttataaggtaatgcaatcaatacaccttgatttattatagtctcgacattctctttatctcttaagtcaactcttacatatgtattctttaattttatattttcttttatagcatcacgagtattcataggcataacctcttttaactcaacttctttcacaaaacaccctttttcacttggtattacaaaatcttcttttcttcctaaatttgcatatttacatggactttcaagcttttttttaataaattcaagttcttcatcatccttgcaagaaataaatatagtcagttctacttctttaagaacttcatagtttaatatgctattttgagctttatgttctttatagtaatcatagtagtttccttgaagcaaaaacttttctttatctttgccttttctcatatttgtatattcattccaaaaatcaatgttctctcctcttgaaaattctagttctctatgatgatgtgttccaattattcctatatctatatcagagtttaatcttctatcacataaatacgttatcattcccattattgtggtcttagatggtaaatttaaagtacttatatattcattttgaaatacttttgggtctctatagtgagcagttggttgcttaagtttacattgtaatactttcataattcaaaaaacctcctactcttttaaataccacatattatcttctccaatttccaatctatctgctagatttttaatctcttttacagggtatttacttaaattaaacttatttaattcctttttattagaaatttttaatttgtcattgatagcaagtattgtgttactttctttaaggctataactttctatagtttctatgactccctctaaatttatctcaccactatcagcattataatctacatcatcccaaaaaaacggtacaactttatcaaaagctccacccattactgcaagtggttttaacagtactgatgaatgttttatgtttcttgtaaacacagtaattgcatctaatatatcttttactgctttttctcttaactccttactcataaattttctttcttctggtaaaagcaactttccatcttctacttctactactcctattctatcaagctccaatgttattgtataaacgtagtaatctgataaagtctcttctattgctaatgcttgtgatgttggaaagttttcatctctaagtacttcattttcttccttctcatcataatattttctaccaaattcgctacttaaaaaacctctatttgttatcaactgtgttgaacctctatatgaatttaatgacctaaaaggtattattctaagcggagaagccttacttatagaacctttatctttaagtggtatcaaataaccaaatacatcagtctctaatccattttcatctacacatcctacattttgcttaatagatggatatatatttccttttttcccaaaaataatattacttaaattccaaccatattcttggtggagcattcttcttaaatcatatgttattgtggctatactagtttttgcatgtattttttctctatattgttctttttttattggtgtataatttccatacccttggtcatatgaaagtggaactgggctttctgtcagtatagttaatgttactccttttactcttttttcattcattttaaattttcccccttttttatttcatgatttcttgaataaatagacctacattcgtatttaattctaattcagaactctgcattagaccttctacaaacccttctcctattaagattccattagaaactaacacatgcattatagtttgaaatagctgagttctatcattagacttaagtagttgaatcactttcatagaaaaattttttcttctggattcatctgtcattttattaaataagtctttacctactcttgaatatattaaattactttccatatagtttttcattttatactcctcccctccatctacaatccaacacaattttatatataaaccgatattatatgagctagatacaaaatccatttctcgagaagttccagttagttgccttaaaacacttatattatcaagtaataattcttttaaatttgataaattcccattatcaatcatttttttacccaaatttctagtattccctggctctcttgaaaaattataattatctataatatctataagttcaattttttttaataattctttatactctataatagagtcaaactttagaattatacctttattcgtatcaatatcaaacctatatagtctaatcgaacttattttttcatgcaaaagttttttataaaatgatttatctgaatacatctttcttttaagcattatcttatgatttaaaaatgctaattcccttaaatcattcgtatatgcaaaaaccattggtctttttaaatttatatataaaagacacattaagttgaaaaattcacactcaaaacaaatattactttcaacttgtccacttcttttaaagcctgatttttctgcacctctaaataaaaagttatacttagagtcctttcgctctcttaaatcaatatctagttttgttgttttatttatattacaaacattacatacactatctttttcttcatattgtgtcaaatcaagtttatctatttcatctatctctatatttgatttaattacagtatctactattctttttacatttgtttccatattttctaaactcgtgtttaatccatacttaccactatttctaacatatggaaatcttctgtttttaaaatcttttttaatcccttccttttgtttctcagttgcagaagatttatctaattcttcaataaaatttacatacgttaaattatctatattactaaatattttttctaaggtttcctttttcccatttttaaataccttaaaaagttgattttctaatatataatcagatatatacttagggtctatatattctgcagattctaaagataaataatttctatttaactcacaagtaaattttagcttataatcatttttttctagttcgttttttaaatccattagtaattcataaaagtaaacaatgccaatatctcttacaatatcacctgatctataaaatttagcttttatttctctcacctcgctactttaatatatcaaccattcctgcattttccgtccttctatatccaattcccattttatacagtgcatttaaatcttccatatttccttttaaaaaaaatgttcctgcataagcatttatatagtaatattctctcactttaaatccacgaatcttttcttttaacactctttttttgaagttaagaggtataaattccaatggctttctaagcccactacctcttatactctccagagttagattagctatatagtttaaacattctatataatttgaatcttctacatctaaatatttaccttctttattctttactattataggagacatagttttaaatataacaccattttcttttatctcgtgttctttatgtatttttatattttttattttaaatctataacctttatattctagctcctttacttttaaaattccattgtataatttactgaacatagaataattataaaaacttatattgaatattatatctccatcaacaagcaactcatttttgcttcttataagatttggtatgtagatggctgtatttatatcctttatttgcttattgttttttctttcttccccatagttaaatatatttttagcaaaatctttgttttctgcatttaaaatattttttataaaggaaactgacaacattgaattttcatttggaaatttgccattacatgactccataaaaattgaaattctgctcatattttcacctcctactttctagtataattcattattctctatttgtaatataaaaaataaaacatatcataaaatgattttttgataataaatttaattttgttttttaattttttaaatatattttactgttagttttattctttgctaaaaattaaatatacatattaaacaaatacatttagtcattttacacatttaatataataaaaaaatttgatactatatcattaaaatttaaatatcaaggagaatattatgtcagaagtaattttaaaaaatatatcaaaactttactcaaatggatttaacgcagtaaaaaatataaatatagacattaaagataaagaatttatcgttttagtaggaccatctggttgtggtaaatcgactacacttagaatgattgctggtcttgaagaaatctctgaaggagaactatacattggagataaacttgtcaatgatatagaaccaaaagatagagatatagctatggtttttcaaaactatgctttatatccccacttatctgtttacgaaaacatggcatttgcacttaaacttagaaaattgcctaaagatgaaatagacaaaaaagttaaagaagctgctaaaatattagacttactacctcttttaaataaaaaacctaaaacattatctggaggacaaagacaaagggttgccttaggacgtgcaatagttagaaatcctaaggtattcttaatggatgaacctctatccaacttagatgcaaaacttagaactgctatgagaacagagataactaagctacaccaacagcttggaactacatttatctatgtaacacacgaccaagttgaagctatgactatggctgatagaatcgtagtaatgaaggatggagtagttcagcagattgcaactccacaagatgtatacgattatccagctaatatatttgttgcaggatttattggagcaccacagatgaattttattgatgtaatattaatagaagaaaatgataaaatttatgcacaaaatgaacatattaagcttaaattgaataaagaaaaacactatgatttaataaaagacaattatattaataatgaagttgttataggtatcagaccagaagatattcatgtagaagatacttttattaaatctaatccagatacttgttttaaatcaagaattgaaataaaagaacttatgggagcagaaacttatgctcacttaaaactaggcgaaaatacgataacaattagatttgacagtaaaaacagaattaatgttggtgatgacttaacactttcagttgacaatagtagagtacacatatttgacaaagaaactactttagctataagataagaatataatcttatttttaaggagactttatggaagagttaaaagattttttagaaagacagcttaataaaaaaataaatatctatccctatgaaaaccaaaagttagatgctagtagccatttagttactttcaataatgctatttatgttattgattttctagataaaaataatcttgataatttaaaaggcaacttttatttaatttaccaatctcatatagactttgaatacctaaaaaatattttttataatttatttgaagatataaatataatacaacacaatggtttttttatagtaaattctaaatataatttagatattaatgtaactacacaaaatataattgaaactgaaacttatcaaagtacttatattttttatcttggtgaattagatagtaaagctgatttttattttagattacagttatgttctgatttactacctcatattataaaagacaatgctgaaaataagtttttaaatttgtttgaccttattagatataaaactttagatttaattaatgaggataatatactcaataaattaatagattttaataagattaaatctattgacgaagaacttctatatacaggaataaaatttataaataatgatttaaatatttctaagacatctactagtatgtttttacatagaaacacgctagtatatagattggaaaagattaatgagatacttgggtttgatttaaagaattttgaaaatgcaatgattttttatctaagtgtcaaatcttattttctctataaaaaaatttaactactaaattaagcagagatttgaaagactagttcaaatttctgcttaattttaattcaaaatattgtatacttatcgagtactctatgcttcaaaacttagaattaataaatatcaaaccagttatgttttacaaacaatatttttaaacttatcagttattagacttattaaatccataaatccactattctacttttcttaattctttctttaatataaaatttaataaaaaacttattgtacctaagaccaccataacataacctaatatctgaaattgttctgatgttatatttccttcaaataccattccaagtaaaacagttgctaaaatagaacctaaataacgactagtttgaaacagaccagaagctgtccctatactgtcacgaggactttcttcaaacatagaggattgcagggctacattaccaactccataactaatacctgctaatgataatataataccctttcctattacaggtatatggataaaaactactgaaagaagtactgcactaataaacataaagattgatgatgtaacaagaggaaatctagttccagatttatctatccattttccagttaatggagatataaatatacctataccagacataaatagcataaataatccagtcgactttgcactataatgtaaggcatcttgaaaataactaggaagaccaaaaaacaaaatataattaaagaaatttaatataataaattgcaagtaaacttttgacaatttaggattacttacaaaaagcttaatatctataaatggcaattttgttctcaattcatgccaaataaaaagacacatcagtattataccaaatacaagttgttctaagttaaaagattccttcatagatagcaaaaatagtaatataaaaatcattgcaattgaaaatagaagtatgccaataatatctaatcttgacaaaacattttttaaagtttcttttatagatttcttttcttttacttcttttgggaataaaaaataccctaagcatatagaaaccaaaacaacaggtatatttacaagaaatatagcatgccatcctcctaagtccaacaataatcctccaagtgtcggacctaatcctgctgtagttgaagcaaaaatggttagaactgctaatgcagaagattgtctttcttttatattattttgtataagagcaactccagatggatatagggtacttgttccaattgcttgaattactcttataaaaatcaatataaagaatgattgaacaagtggtactatggatgctgataaaattacaagcatcaaaccactcaaaaataagacctttctacctattaaatctcctatcttacctgaaactggttgtgcaatagcactagctaggtaaaatgctgaaacaatccaagatacagttgtaaaactaatatgaaaatcattttgtatactatgtaaagcaagtgaaatcatagaagaattaagaggattcagcatagttcctgaacctattgctatcaaaaaaagcgttcttctagcatttgttttacccatatatcatcacgcctccaataagcagttcatttacattataaaaaagctgctcctataattcctgcgtctgaacctaaagttgcacatgtaattgtagctatatcttctgttttgtataatacaaattttcttaccaaatcttctattccatcaagtattatatcgctagatttagaaatgcctcctcctatagatataatttctgggtctaaagaatttattgtgtttgcaaaagtttttgctaaataatctttaaatctatttattactttaattgccactaaatcattttctctatatgcatcaaacaccatctttgcatttacattttctaaatttccctctgccaaatctaaaatcctactcttttctccttcttctatcagtttttgagaatactttataattgcagttgctgaacaaaaagtttctacacaaccattatttccacaattacaattaaaatagttttctcctataatttgatgacctatttctgaacccaatccatgtgctccagaaaagactttttgattaattactattcctccacctacaccagttcctaaagtatataatactccaacattagcacctttcatacttccaaactttgcttctccaagtgctgctactgttgcatcattttctccatgaatttcagcatctggaaatcttctttttaactctttattaaaagcttttttattccattttaaatttacacaagttactaatccttctttatttataaaacctggaacaccaaatccaatagattttatgtcactcatagtaagtttattatcttccaacaacttataaatcattatttttatgtcattaagtattccttcaaagcctttttcaattactgttttacactctgacctaaaaattatcttcccatagttatcaactactcctgcttgtatacctgttcctcctatgtctacacctatataatacatctcttttcacctttctcttttgaatcatttaattttatctatattttattatatatatagtatattaaaatgtgacactatgcaaatttttcataaaagtttatgaacaaagcaaaaacatcctctcacagtatattttactatgagaagatgtctattttattaattattttaatttggcaagtgttcaaaacaaactatatttaaagcaagtattttaaacctttgtctttacttatttttttatctacaaccttatttataattaaacatcaaacaaatcttaagcacatttttagttggtataaactaactttctataaaaaacaatctcaatgttttagcaatttatactaaaaatttttcatagattataagtatatttctttacatatacccaactagacacatattcctttacatacacatctagcacaataaccaataccatatacatatttctttacacatgtatatactaaaagtaattcacaactaggtttccctaattacattctaatcagatataccctttataaaaattttaactcatacaaaagatttaaaaattagataccttgtctatataatattactattttactactaaaagtttgagtctaggtaattacaataattatcccagctcatgagtttttccagtacttaatctagcactaaaagtatctaattttattttgtatattacaataaagttttcttcatcatttggcagtgccacatccgttcccactggaatcacccctttcttttatttgattatattatagcacattatatattttaggacaagtatttttcagaaaattatttatattcagttttattttatgcacatttattttttatacaaaaatagccaatataaaaatcataatatctcctttgacaatcttataaataactaagatttcaaaaatatgattatatattggctactttaactactttttcttaaacatatcttctatcttttgtccgaaggttttcttcttttcgtggacgttcgacccacactccttcgcaaattctctcaatagttctttttgcttatcgtttaattttttaggaatttcaactacaaccttaacatattggtctcctcttgaattacctctaattctagggattcctttctctttaagtctaaatacagttccagtttgtgtcccctctggcacactatatttaacttttccatccaaagtaggtacttctatctcatcacctaaagttgcttgaacaaatgtaattggcatttcaaaataaatatcatttccatctctagtaaatagtggatgtgacttaacattaactacaatatataagtctcctcttggagcacctttttctcctacttcaccttgaccagaaagttttatcatttgaccatcatctataccagcaggtatatctacttctatagtcttaacttttcttgtatttccagttccatgacatttactacatggagattcaatcacttctccagttccattacaggcactacatggtcttgaacttgctatattaccaaatggagttctttgaacagttctaacttggccagttccattacaagttgaacaagttttctttgatgttcctggttttgctccagttccattacattcttcacactcttcacttctatttacttttatagacatctttttaccaaatgcagcttcttcaaaagatatagtaacactctgtcttatatctgcaccacgttgaggccctcttcttcttgctcttccacctccgaagcttcctccaaacatgtcaccaaatatatctccgaacatatcttcaaaaccaccaaagccttgaccgccaaatcctccttgaccaccaaaaccaccttgaccatttaatccatcatgtccaaactggtcataagtttttctctttgtatcatcagatagaacttcataagcttcatttatctctttaaatttttcttccgcctctttatctccaggatttctatctggatggtacttcattgctaattttctataagctttttttatctcttgagcttctgcatctttactgatacctaagacttcataataatccctttttgtactcaaaaattgacaccaccttcattttacaaaacgatagcttgtagaataataaactacaagctatcattaattcttatattctactttaagttatataatctatgatatattatattctttatgatgtgtattgtccatatatctttaacatctatatgattttcacaaatcatatatgttccaattatcatttagtgttacatattatatagcttatttatcttcatctacttctttaaagtcagcatctactacattgtcatctttaggtccattgtcttgtgcttgttctgcaccttgtgccgcttgttgttcttgagctgctttttggtacatttcttgagatactttttggaacttagtcattacttcatctgtagctttcttaagttcttctgctgtagcatcttgattatcttttacagcttttaagtctgctatagctttttctatatcctctttttcacctgaacttattttatctccaagttcatttaaagttttttcagtttgatatatagtagattcagcttgattgaatgcttctattttttctttcttttgtttgtcagcttctgcattcatttctgcttcttttatcttttgctctatttctgcttctgataaattagtgtttgatgttatagttattttttgctcttttcctgtacctaaatctttagctgaaacattaactataccatttgcatctatatcaaaagtaacttctatttgaggtattcctctttgtgctggtggtatatctgttaattggaatcttcctaaagttgtattgtcataagccatacttctttcaccttgaagaacatgtatatcaacagctgtttggttatcagcagcagttgagaatatttgagacttcttagttggtattgtagtatttctttctattatcttagtcattacattacccatagtttctataccaagagataatggagtaacatctagtaataataaatctttaacatcccctgctaaaactccagcttgtatagaagcacctgctgcaacacactcatctgggtttatacctttatgaggttcttttcctataaacttcttaacagcttcttgtactgctggtattcttgtagaaccacctactaataatacatcatctatatcacctgtagaaagtcctgcatcttgtaaagctgtcttagttggttccatagttttttcaactaaacctctagttaattcttcaaatttagctcttgataaatctatatttaagtgttttggtccttctgctgtagcagttatgaaaggtaagtttatgtttgaactcattgttgatgataattctttcttagccttttctgctgcttcttttaatctttgaagagccattttatcatttcttaaatctacaccttcagcttttttaaattcatctgctaaataatctattactatttggtcaaagtcatctccacctaatctattgttaccagctgtagctaaaacttcaaaagttccatctcctatttcaagtatagatacgtcaaaagttcctccacctaagtcaaatactaatattttcttttcttggtctaatttatccataccataagcaagagctgctgctgttggctcatttattattctcttaacatcaagccctgctattctaccagcatctttagtcgcttgtctttgagcatctgtaaagtaagctggtactgttataactgcttctgttactgtttgtcctaagtaactttctgcatctgattttaatttttgtaatattattgctgatatttcttgtggagtatatgattttccatctatatttactttataatcagttcccatatgagtttttatagaagttattgttttatctgcatttgtaactgcttgtctttttgcaggttctccaactattctctcaccatcttttgtaaatgctactactgatggagtagttctcataccttcactatttgctattatttgtgcttctccaccttctaacactgcaacacatgaatttgttgttcctaaatctattcctattatttttcccatgactaaaatcctcctcgagtaattatataattaagttttacttattttaatattttatattaggttaaataatttaacctttaatttatacttagcaagaaactttaaccattgaaggtcttacaactttagttcctagcttatatcctttttgaagtaccattactatttgatttgcttcaactccatctacactttcttgcataactgctagatgtagattagggtcaaattccttagattctgcttctatttcttctactccaaattttaccaaagtgtctattaattgtttatgtacaaggcttatacccttatacatagtatcttccttatcttcacatgcatctaaggctctttccatactatctataactggtatcaactcagttattattttttcatttgcaaatacgcctattgtctctttctcttgttgagttcttcttctgtagtttgcatattcggcttgaagtctttgatatttatcatttaattcatccaactcatcctgcaattttttttctgctaacttagaatttatatctgttacattttcatcatcaacttctttttcatcagttttttcacttgatgtttcacattcttcattaacaacttcctcttctaactctacttgagtttccgattcttggttaatagaagtatcattttcttctcttacttcctgttgctcattttttttatccaagactttacacctcgcaatttaaaatttctttactttctattaattaataaactcatataatttattatagagtaaattctagcataatccattctggtagggcctataaagcttattcgcccaaccaagtctctatctacattataagttgctgtaactatactacaatcctgtgccagttcacaatcattatcactaccaattattatatttagattgtctttttgtattccctttgatttaattatgtcagctattgtttcctttttttccaacatatttaaaaatgactttgcttttaatacatcattaaattctggataactaaatatgttagtagctccatttaatgatagagaaaaatcttcttctttcatatttgagttcaaagcatttaaaagctcatctataagtccagaatactcacttatttcgtatttaataaaagcaattagattatcatccaaatctgttatacttttacctaaaagcttccttgtaagattatcagaaatcaaatttaacttagattgatctaaatatacattagttgtaaggttagctttttttaagtcccctttatctgttacaactataagtaaaatattattgtcattcatagcaaccaactgtatgtgctttataacactttgatttattaaactcttagtaactgctacagttgtatagtttgttagttgcgataatagcttagaggtttcatgaatcaattcttttatatgatttatattatgattcatacattgttcaataagaatcttatcattatcatccaattcgcttttactcataagagagtttacatataacttatagcctttttcagatggaactctacccgcagaagtatgaggctgaattaaataccctaattcttcaaggtcagccatttcatttcttatggtagcagcactaacacctaaatcatgtcttttagatattgttctagaacctatagcttcagctgtttctatataatctttaactatagctttgaggatatttaattttctttcatttaattccatattattatacctcctagctgttagcactcactaagttcgagtgctaaaaagattatatatattatataccattataaatttattttgtcaacaccttaaaaattattccataaattctataaatacactattagatatttctcttcctttttgagttaattgtataccttcaaagctctgatttataagctttctagctaatagcatttctatttgcttattatacttctctctaaaatctattccaaatttttttttaaaatcttcaaattttatgcctttattcattctaagccccataaatatcttttcttctatcatatctttctcagaaagaatttcattttcttgtattggtttttctctttttaccaaacttaaatgataatcttctaaagattctacattattgtatctgttctcattaatatagccagaagctcctgctccaatccctatataatgttcacattcccaatataaaatattatgctcacaattatagccttcttttgagtaatttgatatttcatattgattatatccttttgactttaagtagtttattgtatactcatacatttctatatctacattttcatctataagctcaaatttattactttcatacatattatatagttcagttccttcttctagtataagggaatacgctgatatatgtgttggatttaagtgtacaactttttcaagagtttccttccagtcacatagagtttgatttggaagactgtacattaaatctacattaatatttttaaaacctacacttaatgcatctttatagtttttctcaaattcttcataagtatgtattcttcctataaaattcaaatgcttttcttgaatggcctgtagccctatactaagtctatttatgccaatctctttcatagtttttaatttttctaatgttaatgtcccaggattacactctatagttatttctgcattctcatctatatcaaacatttcttttatacttataaatacttctcttatttcatcagatgttagtatactaggtgtacctccccctacaaatatactcgttattttgtcatttttatttagactacagcattctttatttttatatttattatctttatataatttattactatataatttcatttctatttttaagtcttctatatatcttttttttgaatctatgtccattttataagaattaaaatcacaatacttacattttttcacacaaaatggaatatgtacataaagtcctagcattttttattcctcatttcttaaattatcttaaagcatcaattactaaattataaatcaaacaaaataacacatcaagtaatatataatgcttatattgtataacagtataaaaaatttggataaaagttaattttcacctttacccaaatttatctaacttaaattaagtagttatctttttttcatataataataaactggtaaacctaatagtgttataaatattccacctaaagatataattgttgaagtcaatatttgatttattattacaaacagtccacctagtatagctataattggtattattggatataaagggactttatatggtctgtgtaaatctggcttttgtcttctaagcctcataacacctataaaagtcaatacataaaatacccatattgaaaatatagttaagtctgtcaaaagattaaattgaccagataatgcatatacacaggctaacacagttataagtagtattgaatttacaggagaacctccagaatttacttttaaaagagttttagatgctggtaaagttcccatttcagctaatgtataaggtatccttgaacctgttaataaatatccattcaatgtcccaaatactgatattaatatacccacagttattacttttccacctatatttccaaacaatcttgttgctactaatgtagctggggaagtaactgttgctaattcacttgctggtactacccaaagataagctatatttattataatataaactgccataactaatgataaaccaccaactattgctcttggtaaatctttctctggagacttcatttctcctgatatagctccaacatttatccaaccatcatatgcaaacaaagtagctattaatacttgtccaagtgcatttgatgcatttacaccatctcctacaaatggatttaatacttcactactttgacctttaataaatccaaagactattattaaaattaaaggtatcatctttccaatagtggctactgtctgaacttttcctcctaaggatgaacctattatatttaataacgctaaaaatagtataactccaattgctataggaagtacatttgccatattatttgggctcattcctaaaagttcagatgcttgttgagcaaatattactcctaatgctgctgatgtacctgggaaaaataatacagtttgcatccatccagttaaaaagcctaacttttctccatatatttcttcgatataaatcatcataccaccagtttttggtatagcagctgaaatttctgtagctgtaagcccagcagttattgttataaaaccacctaaaagccacgctataatacctagacctggagctccattagttgtagtgtatattgcttgtggcttaaaaaaaactcccgaacctataaccatacctacaacagtagaaagagccgctgaaagaccaatagtcttttgtagttgagtatgcatactgtccctcctcactgttttacagtatataaaatattaattttataaatttatggttttagtattcccaaagtttttttttatattagtctatagtcctagagtaaatgctatgcgtttaaaaatcatacaatcgtaacttctaaaatattctctaaaaattatttattttatctaaataagtattttcttctataattttttaaagtaattaaattttttatatttgaatctaaaatgtatatatatttaatgctttttcttttagtatttctttttcatttaattctggattatttatgactatttcaagcatcttatttaaaatatgtcctatatctttacctggttttatacctatagatatcaaatcttttccattaatagctaaatctttaagattaaagcactccttttgatttattatatgtttaaattctttttcacactcaataagatttaatatcttttgttttgcatactttgggtttttggcaagtgtatcagcccaattaacttttattaaatcttcaaataattcaacatcttcaagtttatttaataactttttaattatcttccttttaggttctattctataatcatgatattgtattaatattaaaactttattaatagtataattatcatacttaagtcttctcaaaatcttctttgcaatctttacagattctctactatgagtataaaaatggtcaacaccatttttatcagttgttttagttacttttttacctaaatcatgaaacaacattgtaagttttaaatacagttcatcttcaattacttctgtagatattaaagtatgtttttgtacatcatagatgtgatatggattgtgttgagtaacatcttctaattcacatatttcaggaattataaatttcaacaaacctgttgattttaataagtttaatttagatgaatcagatactaatattttattaaactctgtctggattctttcgatagaaacattttttatcaaatctgcttttttatgaatactttgcttagtaccttcagctattttaaaattaagttgtgctgaaaatctaactgccctaagcattctaagtgcatcttcttcaaatctatctactggatttccaacacaacgtatatacttattttgtatatcttcatagccattaaatgggtcgactaatcctgtctttgaattgtatgcaattgaattgatagtaaaatctcttcttgacaagtccttaactatgttatttgtaaattctattgaatctggatgtctaccatcactataatttccatcaattctataagttgtcacttcaaatggttcatgttcaatcataactgttacagtcccatgttgtataccagttggaattgttttttcaaataattctactaccacttctggtctagcactagttgttatatcccaatcgtttggaactctttctaataaacaatctctaacgcatcctccaactacataagcttcataaccattcgtttctaattctttaattatatagtctacttttttaggaatttctatattaatcataaatatcacctttttattcttctttaatatattcttacttatattctctatgagtttacttaaaatataccacaaaaaagctagattaatttagaaataattctaaaatcactctagcttttaaatatatttatctaaatttataagaatttattcatctagtttaagtacagacataaatgctttttgaggaacttcaacagaaccaatttgtctcatacgcttcttaccttctttttgcttttcaagaagtttcttcttacgagatatatccccaccataacatttagcaagaacatcttttcttagagcgcttattgtttctcttgcaataaccttattaccaacagcagcttgtataggtatagcaaactgatgtcttggaatttctccttttaatttctcacacattgcctttcctctagggaaagcacgtgtctcatggacaataaaactaagtgcatccacttgttctttattgattaatatatcaagttttacaagtgtagatgctacataacctttaacctcataatcaagagaaccataacctctagttctcgattttaaagcatcaaagaaatcgtaaacaacttcattgagaggaaggtcatagtgaagcattactcttctctcatctatatattccatatttaacatatttccacgtctttcctggcaaagctccataacaacacccacatagtctttaggaactattatatctccttttactataggctcttctatcatctttatctcagatggttctggtaagtttgcaggattttgtatcattacaacctctccatccatttttgtaactctatatataacagatggagctgtagtaattatatcaaggttaaattctctctcaagtctttcttgcattatctccatatgtaaaagacctaagaaaccacatctaaaaccaaatcctagtgctgctgaagtctcagcttcatattcaagtgcagcatcatttacttgaagcttttcaagagcatctctaacattctcatacttttctccttctcctggatatataccacaatataccattggagtagcttttttgtatcctggtaaaggttcttctgtaggattatttgaatctgttattgtatcaccaacacgacaacttcttatatcttttatactagcagcaatataaccaacatcacctgctgataattcactaagttcagtttgacctggagccataacaccaacttcagttacctcaaactttttattggtattcatcatttttattgtcataccctttttaacagttccttcaaatactctaacataagctacaacacctttgtaagcatcatagtaagaatcgaatattaatgcctttaatggagcttcattatctcccttaggtggaggaacattttttacaatatcttctaaaacatcttctatgtttaaaccagttttagctgaaataagaggagcttcacttgaatcaagccctattaaatcttctatttcattttttacttcctctggtcttgcacttggtaaatctattttatttattattggtaatatttctaaatcttggtctatagcaagataaacattggctaaagtttgtgcctcaacaccttgagctgcatcaactactaatagtgctccttcacatgcagctaaacttcttgatacctcatagttaaagtctacatgtccaggtgtatctataagatttaaataatattcatttccatccttcgctttatacattaatcttatgttttgaagctttatagtgattcctctttctctttcaaggtccatattgtcaagtaattgacttttcatgtctctttcactaacaagcccagtttgttgtattaatctatcagctaaggtagactttccatggtctatatgtgcaattatactaaaatttctagttctactttgtttattgtccaccttaaaattccctcctcttgattattcttatagttattattttacattatctaaaaactctttatataccaaatttaaaatttttgaatataaactaattggcactaaacaaaattatccacattatatgtggattatcaagtctaacactaaatattatataatatcgtaaacttaaagtaaatcctataaaatacagttaatgaatttttattttatacattaaaaatatataactaaaataaggcttattttaatcaataaaccttattcacttattactacttattaaatttttttatgatttcatgtatatcaaaatttggtatgtcaaaatcaaattttgttatatcaaatttaatacttggaaaatcatattgtttcattcctagcatactttttgcattactgtctactataaatacacaaactgatgtacctataatcatagtaatcaaaaataagattctcataatatacttgtattttcttagtttacttttactttctatatttttttctaatcggctcatttagcatgctcctaattataacttaaagctctaatttttttgtttaaaatattcatctaaaatctcggctaaatactttgtagtagccttagattcttctacacttgttgcgttattccctatttctactaacatatgattcttaactgcaaactgattgaatctagcatagtctttttctactattggagatactagaccaggatactttttctcagcaaaagcagttatatcttctgctaaagctctaagttgttttctatttgtatttttacctcctacaacaaagaagaactttgatactctctctccatttatcatagttgtatattttaaatggtctttttccttagtggctggattagttaaatccctagcatctctatgtaagtctatcgctatatccactgagttatatttaggtaatatactttgtattgtttttaagctacttgcataagagttattataagatggatagtcatggtatttagtagtatggactacaccccatcctttgctatctaaagcactagttaatgcacttcctacttccattactgaatttttcttatctcttgaatgataatttccatcaggtgaatttgaataagtctcacatccatgagtatgatatatcaaaattcttggattttctttggttactcttaaatcatccttataatctgaactagatgttgtgttagtttcagttgtgtctgaattttttgactcaatatctggaacattttctttaccaacataaagttttatatattctttttcactctcttttttattatcaactttacttgcatctttagatttagtgttttcttctttactttcttccttattttctttgcttgtttctttatttttattattctttttattttctgtatcatttccttcgactttagcttctggataagatgaatttactaaaaactttaaaaaatcatcctgattcaaagctaatgattttcctggtaaaatgcatgctaatataaaagtcaaggttactactttaatgcattttttaaacataattgctcctccttattttataccaatctacctggatgtaaagacctatttaagccttcacttattattatagatagattttcgattgtatcatctatatcctttggtgttactattaagttcttgtcatatgggtctaacgaatcttttattagatgatatttttcttcttctttaagttttttcaacatttcataaaaactttctgtttcttctgattgagctattaaattgtctattgccatatctaagacatctattgtaagagttgctgcatcaaccaccgttggaacgcctattgcaataacatccacgcctaaagtttctttagttagagattttctagtattgccaacacctccaccaggtgatattcctgctgttgatatctgtatagtagagtttactctttccatttttcttgaagccaatgcgtctattgctactactctatctggttttactttttcaaccaatgactttactatttcactagtttctattccagtaacacccataactcctgggcttaaagctgatacctcagtgaaatcatcatcatagtctttattataatttttaaaaagatgtctagttacaagtgtttttgatacactctttggtcctaacgcatcagaagtaatatttctatttccaagaccaattaccagggtttttttatttttgtcttggccaaatatatctactaactcctcttttaaataacttatcatttcttctctcgactcatcatcatcaaacttcataagattactttccagagttatatactttcctatatctttattcattatctctgcgccttgcctgtctattacttcaactttagttacaatgcaattttctaattctttagtttctatttttacaccaggaatactacttccttcttgagacttttcacacatttcactagcttctaaagctaaatctgttcttacattaatcatataaacctccagtataaattaaatgctaattataattgttaacaaaatttagtattttataacaagaaattgtaaatttatttaaaacaagtaaaattaaggctttcaatgtaagaaaattgggtttagtcagtgatttgtcagtaaactttcttatctatcatttatttacaagcaaaaaaaggtagcaactatttatataggcgctacctttaatctatttataattttcctattaagctttcactaatatattaactaaaataacttttttatatttatacctaatttatttactatataaaaaaacagcaataattatacaataatcacctaacacctttattccttttggaaaaatggttctgcaatttccaaccattcatttggaagataaagcgataaatacccatgattatagcccttagcttcataaatctcacaagagggtacataagactgaaacatttttgcagattttttaacgcacttcatttctttttctccataccagtacattacttgtgctgtggtttttttaacattctctttaagtgtatagttcatcatataagtacgatacatattatagaatgtttcttttcttacatgtggcatatctgtcatataatacgcttttatttcatctggatattgcatattttcaggtaacaattttggcatcatagcaatttgaaagcgacaagccttctcactaaacaaaagtcctccaaaaaatcgaataccagcaatacaaaaccttgccataagaggtcttgggtagcaaatactaccatcaataattgcttttttagtaatattaggttttcgagataaaagttccatgacaatttgaccaccaagtgataccccacacaaagcgaaaagatgtccactgcaattttcatctatatatgatatcaacttatctgctgtatcctctgtagaaatgtatgttgtttcatattcttctccatgaccatccaatgtaggaagtatcacatgatagttgttagacaaaacttctgcttgtcgcaaatagttccaccacgcattccctcccccatgaatcaacataatatgtggtttgtttttatctccaaattcatgaaatttcatatacaacctccttttataaaaataagattcatgttattttgttttatcattatcaaccacaggtggagaagatataattgaaagttttctaagttttagatttgatttaggcttttgttctatatatggtttcaataaatcagctatacttttaagaagattttcatattcattatcactcatatatagtaatgctgaagagaaaaatacattatcctttttatggtcttgctcttttctgctaaagtattcattcatttcctgcatcagacctacataaaatgctgtagaaagtgcaacgaaggtctctccttccatagatgttgtatattcctttagtgcataaaccttttcaatagtaccacgcacacgattttctttaattacttcaatcatattgttctcttctaaaatttttacatggtgataaactgttgcacgaggaatatcatttaaatactttacaatatcagatgtgcgagcactgccatgaagtcgaatatattgtaagatacgaagccttgcaggatttaaaattagttttgctatgtccatcttatcagccctttctttagtctataaaaatattatagtctatttttttagactattcaagtctatgatataagtagtaattacaactataataaatgctacaaatgctattctatataaacactgagattaattacatataaccttctaacatattagttatattgtttgatgcatctatcatacatactaatgaaaaaaattatcttgattattggaaaaattatcttaattaagcatataaatttatatttttataatttttcattaaatttacaaaaatgagtaatttcttgtattttcttataattattggaaatactatcaaaatgtatgttaatagtttgtattatctcaaaatatttgttacaaaaataaaatattaatttatatatgtcaaaatatttaaaacacaaaatataccaatttaaaaacaagatattgcaaattatttatacacaatttacagtctaaaaaatcaaaataaaaaacattattaaaatatataaataataatccttgatttttagatttatttctgttaaaatctaatatgttgacgatgaatatgataaaaaaatacagggaggtgaacacggtggcaaatataaaatcagctaagaaaagaataagtgttatcgaaaagaaaactgctttaaatagagttagaaaatctcaaataaaaactgcaataagaagattcgaagatgctgttgcagctggaaacagagaggatgctgttgcaaagttccaatacgctcaaaaaagaatataccaagtagcttctaaaggaactatacataagaatgctgcagctagaaaagtagctaaattagctcaaaaattaaacggtatgaacgcttaattaccagtttatatttcttatatataataacccctatgtaggggttttttattttgtaaatttatacaataaaaaataaatagttagacatattatagttgattgtatatcaaacttaatttagcttacatctactctgaactataacatatcttgctatttattttttattaatatatagattttttaaattgcttctcttttacagtatctactaaccaacatttcaactgctaaagtatctcttataagacctgtttttattttataatcactttctaatatatagtttaatatttccacaattatatcatcagaaaaatttttagtttgctttaatgcttttcctacaacaaattgatgcatttttaatttatcagctataagttttgttgaatatccatcaagttgtaactgtcttacttgcataattattttaaattgtcttgctatcatagaaaatatacctaatacagattcgccttcttgtatcatatcatttaatattttcattgcattagaagcattttgttctccaatataatcgattaatttaaatatatcattctcaacttttttttgagataatttatcaattacgtcattggttacattattccctttaccaacaaaggaacttattttatttatttcattttctaaatcagataatgtcttttcactgctcttatctctgtatccttcttgttcaataaaatacatgatttgagaattatctattataacatcatttaaagcaaaagatttttttatccatttaaataaatccatatcagaaagcttatcacaatcaaaaacaattccattgtttcctattttcttaactaatgattttcttttgtctacatctccatatacaacaaaaactatagttgtagtgtctggaatattatctaaatgctctattaagtatttctcatcactatctgtaaaattctttttctttccttttaatagttcgaagtcttttattattactatctttctatcatccataaatggaagtgtttctatagagcttataagctgatttaagactatttccttcccatctattatatctaaattaaaatcaagcattccttcgtttagactatctttaaatgcttttattgcattctcaattaaataatactctcttccataaaaaagatacattttttcaaagtttttctcttttacattccttataatatccttgtaattcattctcttgctcctttatctcttttccttctatgtaaaatatgtaaaaaaacactcctatgtaataaataacaacaatataaaatttaggactttctatattaatgtatgcaaaacttaaattgctgattttttctagtaaaaaaaatatgctttctatcaatgtactattaaaaaaagatataattttagctattactacacttactttaaatacgattaaacttgcaatacttaaatacattattactcccacaaatggtactataattaaatttcctataattgaaagcaatggtatacctttaaatgtataataaattataggtaaagttaatatatttgatgatattgtcaatgataccatacttaattttataatactatttattttattatagaatattaatatagaaagtgtagctaaaaaagacaattgaaaacttacattatatataacataggggttattcataattaaaattatcccaattagagacaatgctgatattccatctttctttctatcaataaatattgataaataaaaaatcataacaaatgctatagacctaattatggatggagacgcacctaccattatacaatataaagttataaaaatcgacagtattaataatttatacaatttatttatacctcttaatagaaaggatataattacacataatattcctgtatgaagacctgatatagatattacatgactagttccagttctagtaaaaatttctttttgttcctcagtcaaattttcaacttctgctaatagtatagaatttataaaatctgagtttttcttatataagtacctataagttttactaatataaaactttatttcccctattaaagagtaaagtttatttttatcaataattttatagttatttatatacactatacctttatatccagtactttttatataccttccataatcaaaatcatcatacttcattttatctaaacttttgaatttacctgtaatattaactttctgaccaatcttcaaatttttattttttgtataatcatttattagaaaaacccctaccttgtactgattgtatcttttcttttcaatttttcctttgacaaccccttgtatagttattatcttatcattaagttcttcgtcgttttttgtgttatttgtaatgataaatgatatagctaccacaaacattaatataattaataatggtcttcttatttgaattataatcactcccatataaaagtatattatttagattattttcaaatagaaaatttttaaacaagataaattgttatctaaacaaaaaaatacgtcaaaagatttttaaaatcttttaacgtattctacctatatatattcatttatataggtattttttttagaaaaaatacaattaagtgtttctagtgtttcttctgaaacatcttttatatcatttaagaaaatagcttcatttacatctatataagaaaatgataactgtgttaaggtatttatatctaatttaatatcaaaatcttcttgaggcttttctgcaccttttttatctaactgctctacagataccttcttattctgtatagaaattttaaatagaccattattttcatctataaacttgtcttctattaataaattaaatgagctattaatatccttctcaatatctatatcttcaataaacttctttacatttataactcttcccatcataaaaggttttatttttatatcactatctttagggttgtctaatataaatcttatcttatctattgtaggagtagatatagtaactatcttacattgagtattgtgattatatataaatttaagcattgatttaagggcatctatatttttataaaataactctctgacaaacattttatcttcctgaagaaaataaactatatatccatctttttcatttccttcatgaatgtataaaaatccatcttcactttgaatctctttaaataagttttcataataatgttcatcttttaacacattaccattaacctcatttaaaaaagttctatctattcgtatcaaatcatcaatttgtgataaattagactttatcatttttccacttgacttaaaattttttaaatcatctgtgttaatagtatattcaatctggtcgtaacaatgctcatatccaaatcttctataaagtctatagtcaataggcatcaatatagaaactaattgcccttttttatacaattcgtttaaagtaaatttcattactttgttcatatatccagctcctcttccctctggaagtgtagaaactcctactacatatgatgtattatataccttgctatttagtaataacttatactgatttagctgaagagaagaaataatttttccttcatctaaagctactacagtattttcagatttatatttatcattaaaatagtacttcataaaactctccgtatcgttaaaacaataactccaaatctcttttatactttctatctcttcttctttagcatacctaatctccatatagtctattaagcctccctaacactgtacttttcaacaaatctgcaaggatgataagaaagtttagcttttcttaatccttcaatacctaaatcttcttctctatttacaaactcaacgtccttaaattcacttaccaaaaattgttgatttataaatggatacagacctcttatatcgggattagctttttctatatgaatcaatgccatatttggatttaaaagttctcctatactaaaagcctctaattttccatccacataaacaccaaacacttttaccttatcttttaatatgtcataatggttaaatatctttttgatacctattaattcgtcatccatactttcatcaaattcattattttcttccttattactttcccattccttcattagtactaaacactcgtcaaagttttctttatctaataatttagcttcatatctacctgcatactcttttaagaaatagtttatatggtttctcttcttttgattctttttaccagctagagttcttaaactttctgcatcataaatatagtcaaataaatctctttcttctatatactcaaatctacctggatatttttcttttaaaaactctactacttcagtagtaatacctcttaagtatatttttttattatttttagaaaaatattcaaggacaaaatctacaacttctggaagtttatcttttttagcaagtggtaatattgagaaactatctccttcgtattccccaactaaaacggcaaaatcttcacctatataatatcctgtcttataaacatgttgccacatatataaagtactaaaacagtactcacaagcttcataatctactaaatcaaaatatgggtctaactctttttttgaatttagttcaatatctttgaaaaacataaaatcctcctaccttttttattgcttaattttaaaaattttattttgtatatataaaaaactccaaatttattatggtattaatttcatttatattgtttaaaatataaaatataataagtcatatatatcttatattacccatcataaatttatataaacatgtaatgaatggagtgattttttattgagaaataaaatttttttatcaatacttattataatatcacttttaatcggctgtgacaaaaaatctctactatctatacatataattgatgttggacaaggtgatagtattttagttcaaacacccacaaataagaatatattaattgatggaggtgatgaagatagcgaaaatataattattagttatcttagacaaaaaagaataaaaactattgatattataatagcaactcatccagattcagaccacataggaagtcttgataatgttataaaaaaatttaatgtaaactccatatatatgcctgaacaatcaactgatagtgaggcttatcaaaatctaataaattcttgtacggataaaaacttatctattcagcatctctataaaaatgatgttttaaacatagataacaatataaatatatatgtattaagtccatcatatatacaagaagaatctaatttaaattctatagttttcaaattaacttttaacgataattcttttttatttatgggtgatgctgaagaagaaaatgaaaaagaaattttacattcttttaaattaaataatattaattttataaaaataggtcatcatggaagtaattcttcttcatctttagaatttataaaaaaaattagtccagatatagctgcaatatcatgtggatataaaaatcaatatggtcatccacatagggaggttattaataatctaaaacaaaaccatgtatcaatttatagaacagatagaataggagatattgttttttatagtgatggagaaattatatttacaaaatataattatgaaatagatacataatctaaaaaataaaactacaactacataaaataaggtaatataaaataattaggctaaaagtatgaatataaaattgctttatattcatgcttctagccttcaaatttgtatataaaatttataaattaaaatatttaaaacttattgtcctaatagttcatttactattacagatgcgattattaaacctcctacagatgggacaaatgatacactaccaggtgttacttttctaccattcattactttcttcttaagttctattggttgttcagtagaatatactacttttaactttttgatacctctatccctaagttctttcctcataactttagctagaggacaagtacttgttttgtgtatatctgtaacgactattttagttgggtctaatttatttcccatacccatagaacttattattttcaacccttttttttcacaagtttcaattagatgtattttggaacttaccatgtctatcgcatccacaacataatcatatctttcagttagtatttcgtcactagtatctttattataaagacttcttattttttttatattgatattaggatttatatctaatattctttcttccatgacatcaactttgtaccttcctacagttgaatgtagggctggtatttgtctatttatattggttatatctacatcatcaaaatctacaatagtaatattgcctactccagctcttgctaaagcttcaacagtaaaactaccaactcctccaactccaaatactattatatttgaattattaagtttttctatcccatcatctccaactagaaaactagttctcgttgtaaaattattttccatctttccacactcctagatttttatctaaatatataatagtattagaaaatttacattatataatacaaaacattatatattattaaaaataaattatcttaaaataaatttaaaaaggtatcttttaattaaaagataccttttgcatattggcgggaatgcgtgggaatcgaacccacctaagaggctcttaacccctcatactagttttgaagactagagggcacaccggcacccatccactcccataatgaaatccttctcaacgaaatctataatatcatatattttgactctttgcaacaatttttatagatttatctgatagtaaattataatttaaatagcttttatctatacatggttaaaatttacctgttttattacatatccaaaataaaaactggaaattatattttaagaatctataaagagtttcttctctatataatcaaaatataatttccagtaaaaatataaattatttaactattttaatatacgtatatctatagtttttcttccccagttataaaccgtttttgaatcattcatgtagatatcaattttatttccttttattgctccaccacagtcttctgcagtaaacaccatgtcaaattgaggtatataaactttagttccatatggtataaccttagggtctacagctattgttccccacttaggttttgttcctgttgcagttatactatgaccagtatatgcagttgctaccactctcatatttttaccattgttactactactgctactagatgatgatgaagccattcttcttgaactttctccccttgatgaggctacttgcatttctacctttgtccctttgcttacaaccttatttactggctcagctttaacaacctttttcacaaattccttttcaactttctttccattgtgataagtttctttatatattaattcacttttaccagactttccttcttctttaaccttagaatcaccctttaataaagagccatcttcaacaactgtaacttcaaatggaatgtctttagtttctacaactgttttttcctttacatcaattacttctattttatctccattagataactttgtattttcatctaaagttactatatcatttgcatcatagctaatgttttgagattctaaaaggtctcctacattagaactaaatgttgatatagttctttcttctccccttactactaatgttacttgtttattaagcgcagagtatcccgataatattccaactgataaaacaactgccattaccgagactttagcattactcaattttttaaaattcatataaaatttcctccctaaaattttttacactatatattttgcttcataaaattctgctttgtaagtttctttttttatttgtgttttttgtgtaactaaattgtaactattttttcaagagttgtcaacttgacaaaaaaatagaaatatgcatacatagtattttcaactatttaagcatatttctattagttacaacaatgtcattgtttattgttgttttgttatcattttgttaccttttacttttatatattttctatctgccaattaataggttcttttcctagctttttcaaaatttcatttatcttagagaagtgtttacatccaaaaaagcctttacttgctgacaatgggcttggatgaggtgcttccaaaatataatgtttacttgtatcaatcaactctacttttttacgtgcattacttccccatagtacaaaaataactgggtcttcacgctcacttaaaatagatattactctatcagtgaaaatttcccatcctttgttcttatgagaattagcttcatgcgctctaacagtaagagcagtatttaaaagtaacactccttggtctgcccaaggcattaaatatccattattaggtataaaacaacctaaatcatcttttaattctttatacatatttaatagagatggtggagttttcacttgtggttgaactgaaaaagctaaaccatgagcttgattatctccatgataagggtcttgtcctaatattaagacttttgtgtctttgtatgaagtgtgttttaaagcttcatatatattgtgcatatttgggaaaatttggcgtgttttatattcttctataagaaattttcttaagtttaagtagtaatctttttcaaattcttctttcaataattcatcccaatcgtttcctaagttaaccataattatcaccaattcctttcaattatttttattattttatttagaaattatatcttcttgattatcattcttttcatttgtatttatttttatgctcactctattaggtatacaaactatgctttgacttggcttgtttataaatccagtatgtacgcaaaccttatcagggcatgaagcatctactatctcaacccctttatcatgaatctttactatgttatacccccctctattctctattttaaattcttctttggcatttattgaaacagttttatacaatttattatctacataaatctcaatatttccagcatttttagaatttataacatttattatcccataacatgctataataacaaccaaaatgcctaaaataagaagaatgtcttttttcttcattttttgtcctcctatgaaattatgttataataaaataataacacaatttcataggaggaatataccatgaataagaaaaaaatcacatttatttttgtgatattgattttagcattaattttattttcattttttaggagttcaagccagaatactaaatatagtaaaactagctactaccttggtacagtaaacgaagttactatatttaatgtaaaagaatccaaaagtgataaaatcttaaatgaatgtgattcaattttaagatatattgacaacaaaatgagcactcatataccaggaagtgatgtttctaaaataaatgataatgctggtaaaaaatttgtcagagtttctgatgatacatttttcgtcgtaaaagaagctatacaatattccaaattatcagatggatattttgacataacaattggtccattatcaaatttatgggctattggaacagataaagctaaagttccaagtgattctgagatacaaaaacttctgcctcttattgattataagaacatcatattggatgaaaaaaataaatctataaaattaaccaaagaaaatatgaaaattgatttaggtgccatagctaaaggatatgctgctgataaaattgtagcctatttaaaatcagaggacgtaaaaaaaggtttagtaaacttaggaggaaatatatttactttagaagatggtaaaaatgataaaccttttaaaataggcattcaagaccccactagtaaaaatggtgaatccataggaaacatagaaaccacaaataaatctgttgttacttctggaatttatgaaagatttatcgaaaaagacggaaaaatatatcatcatatgttaaatccatttacagggtatccttttgaaaacaatctaagtagtgttacaataatttctgataaatctattaattgtgatgccttatccacttctacatttggacttggtcttgaaaaaggtatggatttaattaatgaaattgataatgtagatgctatattcataactaaggataagaaagtatatttaactaagggtataaaagataattttaaacttacagataaatctttttctattgaaaaattaaataaacaataagtttaaataataattatatctattatacatacaaaatacatatgaatttaaatagttatcacatgactaatgcaaatttaatttttatataaaatatggtatatacttaagtaatctaaaacaaattctacttatgtatataccatattaatagcttaaatttatataaaatactaattcaaccaaatttttataaagactttaaaaataaatccattctatttaaagcttcaattacattttccttttgagttcctaaatttattctaacatacttctcaccatcttttacaaaatgactcccatcttctaataatactcctgtatctatagccaatttatctgtaaactcacttgcacttatacctaatccacttatatccatccaagctaagtaagatgattccattttcatcaattttatcttattatatttatttacccaagtttctaaaagttcataatttgattttatatattcatttacaccacttaaccactcatgacattcattataagcggttatcaatcctattattccaaacacatttggagaagttatagaattttgctttaatttatttctaaatttatcccttatattcttatttataactattgaataagaagtctttaatccaccaagattaaagcccttatttggtgatgtcagtagaataacattttctaaaagctcttttccaatcttaagtattgaattaaatttaccataatgaatatgctctgcatgtacttcatctgcaaccaaaataacattattttctttacatatagttgctacccttgtcatttcttcaattgtccatatccttccagatggattatgtggtgtacaaaacatcattaatttaggcttattttctttaatttgaacttctaatttatcaaaatttatataatatctatcatttacaacatctaatgtattacaaattacatttacaccttgtttttttgctgatgattcaaaggggtcataaactggtgtgtttaatattatactatcacctttcttacaaaaagcttgtactacataatgaagtgttgatacagttccataagttaatgtaatccattctttttctacatttacctcatgcatatttttttgccaaccaataactgaatcataaaattcatcataacagtatgtatatccaaatacacctcttcttacagcttcaataaatttgttttctatttctgttggtattttaaaatccatatcagcaatccacattggtacaaaatcttctctaatatctccaaatttatctcttataatatttaaatcccattttctacacttttcacttactctatctggtttatcatcaaaattatacatttaaatttacctcttcttttcttattgttataaaatatttatctaatttatttttagcttacaactattaaatccttagtagatgtagtcaatctcatacatccatcttgtgttatgagtacatcatcttctattcttacgcctccaagacttggaacatatataccaggctctatagttacaatcattccttcttttaatacttcatttgattcaggagctaaggcaggatattcatgaaccataattcctacaccatgacccagattatgaccaaaattattggcatatccatatgaaccaattatgtctcttgcaactttatctatctctccagtagtcattcccggtcttaaaactcttatacactcttcattagcttttcttactatattatatatttcttctaactctttatttatagtacccatacaaatggttctggtaatatctgaacaataattattatacttagcaccaaagtcaaaagtaacaaaatctccatactctataattttttcacttgcttttccatgaggtaatgctcctctaagcccagatgcaactattgtatcgaaagattctttttgaccacctaaatcttttataattctaacaatttcattttcaacttgcttttcagtcataccaatctttataaagtctactatatgataaaatgtagcatcaactatttcacaagctttttttatatattttatttcgtcttcattttttgtttcccttaatgtagataaatcaactgattttaaggttgcacttaacttattactcatacttctatataaatcaaaagatacttcatttccctcaaatccaatttcctttatattctgctctctacaaatatcattaattatatcaaaatgagttctagttttgtccattaatactacattaaacaaactagattttcttttaatttcttcaaaatatctaaaatctactattatatattgtgattctttcgttataaaaacataacctgaagagctaaataaatttccaacataaaacttgtttgtaggactatttataagaaatccatctatatcatattctctaaaatactctcttactttttctatcttatccatatcttatctccaccgcctttaattaatcatataggtaaggctggtaatattgattaaaaccatattaccagccaaagttatttatagatagtaaaaattaaatactagtcgatataatctacaacaagtttaccatcttttattaatttatttctatagaatatatttcctactgctatgaatatagcaccaactgctatacctattatatatccaaataagttatctactagaggccatgcccatatagctgactctgggaaccattgaattgctcctagaattatacctgtaatagctcctattacacttccaactatgtttaaaggtataacaaaacctggtctctcaagtgcaaatggtattgctccttcagatatacccataaatgataagaatatagaagtttttcctgcttgatagaattgtctatcatatactcttcttcctactaatcttttatctaataatgttgttaatcctaatccaattggaggaacaactatagctattgttcttgctgttattggaagtacattctctgtagttaaaccaagtgcaacgaatcctgctgctttatttattggtcctcctaagtcgaatgctgtagctgctgccaaagctgttgcatatacatattctccagctgctcctgctgctgttaagaagtttttcatactttcattaattaatccaccaaatggagttattataaatatcatcaataccatacaagctaatgacgctattaatggtattaaaaatgttgttttaaaagctaaccagttatgagaaacttttatagatttatttaaccattttacaaaatatcctattatgaatgctattagtattgcacctaaaaatcctgatgcaactggaacaacttcagtccattgtccatcaatgaattgtggtacacctacaggtttattagctatatatccacctataaatcctgcaattaaagctgtttttccacctatagagtttgcacaaaatgctgcaaacagtggtatcgcaaatccaaacaaagtaaatccgaaatttgacattaattgtgctatatttaaaagactaagcttgaaccctgtaaattctcctgagttcatagcatcaactatacctacagatgggtcaagtcctaatatagcatatggtattaattgagataaggcccctataagtccacccattactaaaactggtatcatatatgatatacctgtcattatatgtttacttatttctttccattttccatttccctttgattgagttggactagatggagtagattttcctacattatttcctcctgttgtagaagcacctgaactgtttataacttttttcttaattgccattctatttcctccacaataaatttattatattcctaaatcttcttctatttcttttataacaccttctgcattttttatagcttcttgtaattcaacttcataaacttcacaaccatcaaatctttccataccttctggtgttattgctactgcatgtattatcatagttgctcctaatatatcatctcttgttaactcattttgtacaccatcagcaccttgagtttcaacttttgcttcataacctaatgcctttgctgcttgctctattgcttctgctgccatgaaagtgtgagctagtcccattgggcaagcacataatgctactaattttttattcatttcaaattcctcctatttttagttaattatttttttattttataaccttagtatttaattataaacctaaagcttcatttattaagttagatatttcttcaacattatcactttttaaaagagaatctttaaattctttatttattaattttcttgaaagagatgataataatttaagatgaatattctctttactttttcctggcataagtaagcttattgctaatttaaccttatcctcaccttcattccaaacaacatcttcattaaacttcaatactactactgctggattttcaattgcatcatttttagtgtgaggtattgctatagattctcctaaatttgtagtaaattgttcttctctagccattaaaccttcatatactaagctctcatcttctgccaaatttaagtctttagctttttttgatataaattttaaaacttcaacctttgacttagcatcaacatttaaaaatacatattctttgttaaatatgtttgttcccattattaatttcctccttaattacctatcagtgccattaatttattaaagtcacatattttaataattcctcttactcctccttcatcttttataaaattataaaggtatttaaatatcgagaaattatgcttttctttagtattaaaaaataccataaatactagctgaacctcttgcttatcccaaattattggattttcaagtattccaactcctattatagattttttatctcccttcactattgtgtgaggtattgctactagatttcctatttcagttgatgaaatattttctctatctattatactttttatagaactttcctctataaaatctctttcttttagtttatttgaaagtgaaattatgacctcttctttagtactagcctttatactgaaaaaagctttttcatcaaacatgttacttattatctttcttctttcttccttttcataaaaggctttgtttacgttttcaattaagctatcatcaaatatattttctatatataagacaggtttttcatatccttttaattcaacggtagatactatcaaatcaacatcttgacttatagccatatcaagatatctaactggataaacacctacaacacttaaatcacttatattctgttttagcttttcagaaataagttgtcctgttcctatcccataatgacaaactatacaaattttcttactagtattttttttcattctttcatttgaagcagcaaagtggatagctatatatccaagctcatcttcatcaagttttaaattaaactcagtttctagtttatttgataaaaacacggctaaattaaaagctataggaaacttctcttttatttgatgaagtaaaggattatttgattttacattagctctagctctatttaaaaatctctttatatggtcagagattgcaaccataaactcatcatcttttgtataatcactacctgaaataaggaatatatcttgaagtgcactacttataacactacttattcgttcctcaatttcacttgtgttttttcttccttgtgtacctttataagctattacaccagaataatttgaaatataaattacttcatcttcaataagtttaaatccaattttatcagatatttctttcattagattttctataaagtagtagttatgaaatctataacttgtatccattaagtttatattgttactatgacctctcttactcctaaatacagaaacaattatttttgaaagcaaaagattaaaatctttatctgaaattattgtatctttttctcttaagtgcttttctaaaatactttctatacagtatatatcgttttcactaatgtcatctaaaaacaccttcactttacttttttcatctaattttattgcatagtcagtaattaattgccttatattaatttcttcaccatgtatatagcttccatagtaaggtttagattttataactaagtcatacttttcaagttttcttttaagcttactagacaatttatttatagcggctatacttagatttaattcttctgccattgcttctatactcatataatttctattaataagcatacatattatatttgacattcttgactcttcagagtcatctaaaaaaccatcaatatatttatttgcttctttaacagctctggctatattgtttttagaaccgcttaacttgtatcctatacctctagaagaagctattaccaaatcatatttgcttaaaacactatttaaatctgctatatatcttttaatagttttagtagacacatccaatttgatagctaattcgtttgatgtcatatatccatctttattgcttaaactctttactattattgcatgtttcttagttatcattgtatcaccttctctttgatttcaattatatatcaagtaaaattttaattgtatatataatatgtctatataagggacattttgtatttatattttattacataatgtaattattgcctctgcatatatacctattgcagttataaatctatctaagctagcaaattcattcgcactatggacattgccaaagctaccatcaggaaattcacaaccaaatattactgaattattcatttcagaagcataacttcctgcactagttactctaacatcatttttcaaatctccagaatactttatatatatatcatgcaaacttcttacaagttttgaatttctatctatataatttgcttgctttaaattttccccaataagctcaaatttattaatattattttgctccatatacaaattaaatttttttattatatcttcaatggttaatatttctggatatctaacgcttaaaactacttctaattttccatctactatatttattattgttggcactattgataaaatcccacatttcccctcaatatttaaaccaaataagtttccatttatattatcttgatttatcaacttatataaatcttttgtccatttttcatcaatattttctgacaaaagtttaattgtagctaatataggatttattgatttttcgggtttagatgaatgaccaccttttccatacacaatataattgccattatcataatttatcgatatattgttaatatcaaaacatatattatctttacccaatttttctacattctttatataaactttatctggtattgtattaaactctattccaccacttatatataaagatttatcgtctatatttgaaattaactttattattgctccacctttttctccatttaatacaggaaatttagcatctggagtaaatccacatacaccatatggctctttgctataataatgctttatacatttaaatccactctcttcatttcctccagctattaatctaacctttctttttaaattaatatctaaatcctttatcatttttagtgctaaaaaattcactatcataggtcctttattatcagatacacctctagcaactaatttatcacctataatatttagtttaaatggttcactatcccatccttcacctggatttacaacatcacaatgtccaaatatatctacatattctttaccatttccatattcaatttgaacagcatgattatctatattttttactttgaaattgttttctctacctagattttcaaaccagtttaatgcatcatatactccttttccaaaaggcatatctttagatacagtttttctatcataaaatgaaggtatactaacccattgctccaataattttaaaaattctttttcatattttttgctttctgccttaaacaactccataattatcactccaatttagaactttatattatatatcatagtttatcttatttaataactccttatactttatgtcatttcaagggacaaaacttttttactattgattttataatctatttatatataattatttgtaggataaatttaatatcataggaggaacaggattatggaaccattatttttaaaacctatttttatggatagaatatggggtggtactgcacttaaagataaatttaattatgaaatagattcgccaacaactggtgaatgttgggctataagctctcataaaaatggagattgcttaatagaaaatggaaaatataaaggtaaaaaactatctgaattgtggaataaaaatagagaattatttggaaacacacctggtgataagtttcctttacttacaaaaatattggatgcaaatgataatttatcagttcaagtccatccaaatgatgaatatgctaagaaaaatgaaaatggagagttaggtaagacagagtgttggtatgtaatagattgttctgatgatgcagaaattataataggtcataatgcaaaatctcataaagaatttgtaaatatggtaaataataatgaatgggacaaactacttagaaaggttaatataaaaaagggagactttttctatgttccaagtggtactatacatgctatatgcaaaggaacattgattttagaaactcaacaaaactcagatactacttatagagtctatgattatgatagaactgacaattcaggtaataagcgtgaacttcatgttcaaaaatcaatagatgttacgaatgttcctcatataaatttcgatactgactataaaatcgtatcaacatcagactttaaatgcacaacatttgtgtcaaacgaattttttagtgtttataaattagatgtttttggaaaatgtaattttacacacaatacacctttttctttatacagtgtgttggatggaaatggaaaacttatacacaattctgtagaatataatttaaaaaagggtatgcattttatactgccaaacgactttggagattttagttttgaaggtaatttagagattatatgttctcacatatagatataaaacctagctaaaaataggctatcataataatttaccttatgatagcctatttcttacaacttaaatatttaaacaaatagtatttttattttatttttgctcataatcatttttaatagtatatatcagaaaattctatttttattttttcttgaatattatatattctcttatcttctgtgtaatgttcactactaaatcccttcattggaagtgaaattaagaactctgtgcctttattcacttcacttactacttctatatctccaccatgaagacttactagattcttaactatagcaagccctattccacttccttcagtatttctggataaagtcttatcaacttgtgaaaattcttcaaaaatcaattctaatttatcttgtggtattccaactccagtgtcttttacacttatgattactttatctattttataatgaatacttacatatatccagcctccattatcagtaaacttaatacagtttgacaatagattcaacataattctctcaatttcaaccttgtctatataaacattaatttcttcaaggtctgtatcaaaaagaatttttatgtcttttctaagtgcatactcttctatattcataaataagtcttctattacagatacaatattgtatttcgcaagttttagtgtatagaacccagactccatctttgttaaatctataatgttatttattaatctttgaagcctataagaactttgtctaactaaatccacatgagatttaatattgttattgtaatcttttatcttttcatttctatagaaagaatctaccagttgatttgaactagatataacatttagtggagtttttaattcatgagacatatttgcaaaaaactccgttttgattttatctgttttaaatctttcaagcagttctttttctgcttgctcggaatatttcttatgtactaaatcttttataataagcattatgtatctagtattgtatatagcaaaaggtaatgcacttaattctacttctactatatcatcataactatttatcaattcatattccagtaaaagtatacttctattttcatttaaaactttagccatattatccgtaaatttcattttttcttcagtattcgcattcattaatagtttaatattagaatcttttatatcatctatgtttgtaaaagctagcatatctaaaaacgacttatttgcatagtttatacttaaatcttcttttaataagcatatgccatcaggtaatatatctataaatcttgaatatgatgattgactttcctcaagttttatttgagatatttttcgagaggttgtatcacgtattacaataatagttttattagtaccagcattagtatactgagaaaaactcatctctacatactttacttcaccatctattacatatcttttttctatactttcttcacttttacatactaatgaaaaatcaatactctctaaattatttttaaaaatttccctacatgcattattaacatatattttgttattaccttcaagcactactatgccatctccaatactttctaaaaaatctttacttctcttatttgcttcaataagtttgcgttcgtactcctttttcttagtcttatcttctagtacacacaatactccttctgtttgtgaagcaataattaaaggtgcaaatatagcttgataaactttattatcgcttgtactaataagtttctctgcattcttctcatgaacaaacacataatgaatgctttctatcaaatcattgaagttttttattttatcagtcaatttatcttgttctttatagtctccaaaagtatttctaaagctcttatttgcatatgtaatttctccatctttgctaaacactactatgctatttactgctacatctaatgtagattgtagcctagattctcttttcataagtattcccttaagttcctctatcttttctgtctcatagattaattttttattcttttcttttaaactttccgttttttttgttaattcttcattcgtatcatgcaattccagtgctgttttcttaatattcttagatactatgtaattatataaataatataaggctacatttattattatctgtgataatatccgctctacatttctattatcaataactatatgcaatagatttggaactcttgataaaattattattactattattctgttaaaaatctttttttcatcatattcccatttacctttatttgaacttgaatttaattcaattccactaatgatagaaataattattatgaatatagatattataactcctaaagcatattgtgatttaccatttcccagatagtcacaaattcctgatattatgaataaagatgttattgttaatgtagcagttgctataaataaaattatacttgaataaatttgtttgttatccttaacaaatttaaaacttaagtatacacccagtataggaaataaatctgttattgctgatattgtgatgttaatctccattatagacttagttttaatccccaaggaattaaataaatatatacactccaatactccagtagctataaaaattaatcctaaaaatgtagaaaatgaatctactttaaattttgtagtattaaatataattactcctgtagctactaaaaatatcgtatatatggcatgtaataaagtttcatatttctctatatcttttataataaataataaaagtactgagcccattattataaataaaaggctcatgtcttctctttcttttatatctggttttacatcaggtattatattcttcaatactttacacttcctcttaattaatattttatactaattaattatacgatactcgacattataattccttctttataccttaaagcaaaaacagacattttctgctaaaacaaaattcttttgttttctactcttttagttattttgtttctatcgaagttttccaatataatcatgcaattctttctgctagaatcaatcaaatctctgtattctcctaatgttatttctttattttcttttatataatttatcaaaatgttctttgcattttcataaatatctttgtccattatatacaaatcatctaatttctctactttattacctatcattgactccaatacttcagcatagttatgatttccttcagaaacttcatctattgtcagtatagaagaaactccacatgattttaatcttttttctattttttttgctatttctttttgcttatcatttaaaataacctcaaaatctaatagagatactatattattttctatttttatagcattttctgtagacaatttttctaataaaatatccatctccctagtcttaaaattactctctatcttagaccttacttcttcttttagtatcccttttctaagcctatacttcttatggtactcacttaaaagctttattgtattttcttttaatttattgtattgatttatatgcatatacatatttcctataataaatactttatcttctgatataagtgcttcaagcgctctttttacatcttcttcatgagcaccactatagctcattatttcttttatatttggataattttttaaattcctttttaagtactcttctattatatcttttagttcgcctttttcttttatttttaatgcttctataactttttcatcaaatttcttatgttttttaggagatgggtcaattattacacctccacctatagtttccattggagaataacgtctcactacaaacgtatcacctttcttagatactatgctttcttcaagtctcaactgaacatagccactttctccactttcaattaattctttatctagtggaactgctctacaaagtatctctctagttccatgatacaatcttaatctatcccagtgctttaatcctttatctaaatgatttaccaatgataattttacatctaacatcattgattcctctaatgagtttggtgcagctaaaacatctcctctttttatatcatccacttttacatttgatatattgattgctgttctttgacctgcataagctgtatctttattttctccatgaacttgtatacttcttatttttgtttttaatacctgtggatatataactaaatcatcttctatacttatctttccttctattaaagtgcctgttattacagtaccaaacccttttattgaaaatactctgtctatattaagtcttgctggagagttttcatttttatcttctatatcatcactcattttatctattttttcaataagagtgtctatacctcttttagatatagaatcaacttcaattatttcagcatcttcaagaaaagttccttttattttttcacaaatatcttcttttactagctctctaaattcatcatctacagtatcagacttagttagaaccactattccatttttgatatttaaaaagcttagaatatctaaatgctcaactgtctgtggcataaccccttcatctgctgctacaacaagtaaaactatatcaattcctgatgctccagctaacatgttttttatgaatttttcgtgtcctgggacatcaacaattccagctcttctattgtttggtaaatcaaaataagtaaatcctaagtttattgaaatacctctctttttttcttcatctaatgtatcagtctctcttccagtcaatgcttttataagagtagtttttccgtggtcaatatgacctgctgttccaattactacatttttcattttttgccccctctaaacctgctatgactaaagtcacaagtatgtgtagctattttttaatcaaaacttcatacttatacttctaaatttaatatttattagctcaaatttatttaattaaatgcttttctcaattccgcaactattacatcaaattcatcatcaaatatagttcttacatctagtacatatttattatcatacactctggctattatatgtgcttcactaagtcttagttttttttctaaagatgaaacattcatatgttcaggagttattgatattacctttgtacttatagtttcaagaggcatagaccctcctcccacttgtgaaaatccatcttctatatttatgtttgcatttaagtttaaagcagttattttttcaaatagtttatttgcttttacttctaattcttcaattttatatgtcaacatttttaaagtaggtatattttctatagcttttgtctcatctaaatacattctcaatgttgcttcaagagcacatattgtaagcttatcaactctaagtgctctagtaagttgatttttcttcattttttctatatactcttttttcccaactataatacctgcttgtggacctccaagcatcttatctccactaaaagttactacatctgcaccttgtcgaatagaatccaatacagttggttcataagataaaccgtattttgataaatctataaaaactccacttcctaagtcttctattacaggtagtttatattttttacctaaattaaccaattcttctatagaaacactctctgtgaatcccattattctataattacttgtatgaaccttcatcaatacatttgtatcttctgtaatggcctccttgtaatctttcaaatgagttttattagttgaaccaacttcaactaattctgcaccactaagagccattatacttggaatcctaaatgaaccacctacttcaactaattctccacgagatacaattgcttctcctcctttagccattgtgctaagtacaagaagtactgccgctgcattattatttacaactagtacatcttctgctccagtaagtctttttattgtactagttaaatgagagtatcttgaacctctttctccattatccaaatcgtattctaagtttgaataccttgaagcagcacaccataattcatcttttatatcttcactaagtaaagacctccctaaatttgtatgaataactgtaccagttgcatttataactttttttaaagataatgagtaatttaacttaactctctctattgcagattctattatttcaccaaactctattgttacagagtttgatgcatcttcttttaatcttaatataaattgtctttttaaatctattacttctctcacagattctaaaactaaacttctaggatattcatttattatttctacaattctattatcacttaatacttcatcaactgaaggcaacattgcaaacaattctcttttgctcaaaacaatcactctttctctataatattttataaaactgtaatatatttttccccttttggaactacagaacctataattttagcttctattgctccatttaatttcatatcttttacaagttcctctgcaagttcttcttttactgaaattaacaaccctcctgatgtttgtgggtcgtataaaatatcttgaactgcaacttctatatttcctacaacttctacatctttagatacataatgcatatttttatacataccagcaggtataattcccatttgtgccatttctattgcaccttcaataattggtacatgttttgattcaatttcaatacttacttcagaagctttggccatttctaaagtatgaccaagtagaccaaaaccagttatatctgtaaccgaatttacatcaaatttctcaaaactcattgctgcatatttatttaaatgtatcattatttctattactttatctgctatatgttgttctaccataccttctttcatggctgtatttaatacacccactccaattggttttgttataattaacttatcaccaggttttgcagtagcatttgataaaactttatttggacttacaatcccagaaactgaaagaccatatttaggctctttgtcatctacagtatgccctccaaccaaaagtgctccactttctttcactttatcaaacccaccttttaatatttccgcaagtacatccatatcatggcatgatggaaaacaaacaatattcatagcaaccaaaggtttgcctcccatagcatatacatctgatagtgaatttgatgcagcaatttgaccaaatacgtatgggttatctaccattggtgtaaagaagtctaaagtttggataagtgccatatcatcatttaatttataaactgcagcatcatctgctgtatctagtcctactaataaattttctatattatcatttttaggcaattgagataaaactgatgccagaacctctggccctattttagcggctcaaccacctgctgttgtcatctctgtaagttttttttgttcttttttcataaaagtgcctcctttactaaatttccacatgtacacacatatacatacatatttataataacatatctatatgtaagttttgtattatattttagtctacacaaattaaatcttttatattttcatactttttatctccaataccatttacattttttatttcctcaattgaactaaactgtccattttcttctctgtgttgtaaaattttattggctgtagcttctccaaccccaggtagagaatctaactcttctatagtcgctacatttatatttacttttgattcgttagatatatttttattggatttatttttaggctcacctcttgactcattcttctgatttggtttattggaatcatcattacttgtaacagatgttgcttcacctattttaggtattatgtaatgttgttcatcttctaatcttactgatagattgactccatttaaatctgcttcttttgtcgttcctcctagtaattctacagcatcataaagtctcttgtctgactctatagttacaattccaggtctatttactgctccacttatgtatatagttattttattattttgaaaatttttatctatgtctttagttactttattgtgattattatcttcacctttaatttcattctctacaacatgtgttttttcattaggtaaattttttttacttacaacataaatatcatctttgaaaataagcgatttataaacgattattgatgatattattaaaataaataaaacaaaaaacgaaataaattttaccttttttttcatatattaatcactcctttcttttaattattgacaaatatatgctatactaaaagatgaatttaaaatttggaggctcacaatgaaaagaaatttatcacttttattaatctgtttattgatatttacttcatttttaggaagctctaatatctcttttgcagataatgaaccagctatagttgctaaacatgcagttttaatggactatgagtctggcaaaatactatataataaggatggaaattctaagctttatccagcttcaacaactaaagtatggacagcttgtttagttctaaaggaggttaaagatttaaatcaagtaatagaaattaaagatttacctcaaatagatggctctagtatgtatctaaaaaatggggaatcttttactgtaaagcagttactagatgctcttttggttcattctgctaatgatgctgcttttgtattggctagatatgttggtggtggcaatgtacaaaaatttattgacctcatgaactctgaggcaaaaaaaattggagctactaatactcattttaataatcctcatggattaccagacccaaatcactacacaacagctcatgatatggctctcatagctagagaagctatgaataatgatacttttagacaaattgtaaaaactaagtcacttaaatttgaagctacaaaagcatatccttatgagagatactttgtaaacactaataagtttttgacatcacatgataagattacatacaaaggtcaacctataaatataaaatatgatatagttgatggtataaaaactggatatactgatgctgctggtaaatgtcttttatcgagtgctgtaaaagatggcagaagagttatcgttgctgtatttaattcaactaatgctgatttatatttagactcacgtattctgattgattatggatttgataactttaagtgtgctactattgttgataaagaaaaatacacagatactaaaaaagtattgtttacaaaacaacatgaattgatttatgaaccaaaaaatagttataggatattcttagaaaaagatgaatctcaaggcaattatgataccaaaacagagttaaataaaattgatttgcctataaaaaaaggagctaaggttggtactttaaatgtatataataatggtaaactagaaaacagtatagacttaattgcaaaaaataatcttgatagcagtcttccattttttactggaaataatattttaatgacttttgttaagattattgcaggtattctagtgcttttagttttatttataatagcttcaaatataaagaagaaaaaaagaaaaaaagctagaagtaaaaaaaatatgaaaaagtaacaagtagttggaaattataataaaaaatttataatatacttatccttataaatctaaaagtactgagataataattataactattatctcagtacttttaattttatgtttatgtattttttatacctatatatttttttgtttttgtttgtctttaagcttacattttgaacaatttcccagacattcatcaaccatatctagacattcattaaatgctaccttactactatttttatgccttacgattaatatatcttgttttttagcttgagactcaaccgttctagacatcttatgtgaaacagttgatgtaagtatgacaactgcatctggtcttcctatagaattatttaatttagatgacatggtagtatatacctttgtcttataaccttttttcttggccataaccatataatctttttccattctttcatgaccaccaatcactaataagttcattagatttcctcccatttatttgatattgattttcattattatttatattatatataatagtatttagaaataattttgtcaatacttattgatattaattatcattttaataataattttttatttgtatttattttaaatactactccttttaagtttcttacttttatataataaaatcttacacaataaaaagctgtaaatttaaatgataacattcaaatttacagcttttaaaaataaatacattattttaaattcttttttattcccttatttaatatactctcatagtcgataaaatcataaatatcttccttaaaagcatctgaaaacttatgtaattcttctaatgttaaatcttctattgcttttttattatcttcacaatatataacgatacttcctactataccatgtgcatctctaaaagcaacattatttttaaccaaataatccgcaacttctgttgcatttaaaaaaccattttttactgcttgtttcattttatcctcatttacctttagtgtggctatcattctatccattatttgtatacacatttcaagagtatgtacactatcgaaaaaaccttctttatcttcttgcatgtctttattatatgctaatggtattcctttcattactgtaaaaagaccaaataagtttccatatactctgccagtcttacctcttataagctctgcaccatctggatttttcttctgaggcattatactacttccagttgtatataaatcatctatctcaacaaatccaaattcttgagaactccaaagtatcaactcttcacttaatctacttaagtgcatcattataattgaaaaatcactcattagctctagtaaataatctctatcacttactccatccataaaattatctactacttttttaaatcctaattgttcacaagttatacttctatctatatcatgcgtagttcctgctaaagctccacagcctaaaggtgattcatctaatatttctatagcattttttattcttttctcatctctatcaaacatactataatatgccattaagtgatgcttaaatgtcactacttgagctctttgaagatgagtatagcctggcatcatcactgggtttttgtcagcaacatcttttatagtagctttaaattcagatattaaacccaccaaatcatttgctttttctttagcatacaatctcatatcaactgcaacttggtcatttctactacgtgctgtatgaagcttcttgccaacatctccaattctttgaattaaatttatctcagtaaaactatgtatatcttcatactctccatccaatactaactttccattttctacatcttcaagtatcccttttaaaccttctgttatagactttccttcttcttctgttaaaagtccacattttacttgcatatgaacatgtgctacacttccttcgatatcttttttgtacagtacacaatcatagccaaaagatttattaaattcttccataagttgattttccgcttttctaaagcgtccgccccataatttcataactttcacctcatattttaattttttgtattttaattataagtcttgtaactcaatgaaactaaaaaatctcttggtcaaaaagaccaagagacgaaatattccgtgttaccactctagttggtaaacaatgtttacccactctattctcttaaggcgagattacctactaccatactgaatttcaagtagtattctccaaagttcttttcaatataaagtgttatcattaggctcacaccatcccccaattcgctgagattttctctatatctactctctttttcactgaatctaaatttttatgttttatctatttgtattataattactatctacaaaatagtcaacctattttttcctattatatactgttttaagagctaagtgattcttttaactctaggaatttataaattgcctttgcaactccactgtcttgatttgtatctgtaacataatcagcttcttgtttaatcaattcttctgcatttcccatagctaccccaagaccagcaaactttatcatttctatgtcattgtaattgtctccaaatgcaattatatcttctctgtctatattcattttttcagctaaaattttaactgcattacctttatcaacaccttcattcatgacttcaatattgtttggccatgaagaagttatctttattccttgaacttttctcaattcttttcttatttcatccaaaatagatggatttttttcttctatgattacaaattttagtatatcttttttaaagatttcttctctcaaatcatcttttacaattacttctgtttcagagcctaaaaatacacttaatctatcttcacgtccttctatttttttcgaaagcatagaatctatactattacattggtagtaaatatcgtatttatctaatacatctaaaatgtttaaacatgttcttgtatcaatcttatttgaatatattatatttccattttgctctcttattaatgaaccattacaagctattattggcatgtcctctttaagaaaatctacattgcatttagctgaatcgaaggctcttcctgttgctaaagttacattaataccgctttttataactttttgtagtgcagttttattttcatctgtaactttatgattattgcctaataaagttccatccatatctgttacaattaatttatatcccataatccaactccataactttttattgtatacctatatttccttaatataatctaaagaattacccttattagattatatcataactttatacttaaactatttcaatttacaaaattaataacattcatttaacttattttaagagcaaaataaatcgtttcttgtagtatttttctgaatattttcaatttatagtcttataatgctagaaattttacaatatatgatatataatcatattaaataaagtgagctattataatatttatattcattttttactattatatattttcataatattttaaatctagcaacttttataacatttattattgactaaataaggagtgataaagtatgaaactaaaaattaacaaagctattgaaatgcagttgaaaaaaagttatgcaatagaatctggacattcagaagatgtattcgagatagactgtggtgaaggtataaataccgtgtcttactcaagcaaagctgtagaagcttttaatgctttaaaatttgatatgataagaggatatcctcattcaattgctttaaaagataatatagtcgattattggaaagattttatagcattagatactgacagaatttgtttggcagatggttctatacatgttatttaccttttaaatagactatttattgaaaagggagataaagttttaggatattcacctcagttctcagaatatgagacagatataaaaatgcatggtgcaacttatgattatgttcttttaaagaaagaggataatttcaagtttaatgaaaaagaatttattgaaaaaataaatccagaatataaagtaatttacatagacaatccaaacaatcctacaggacaaattatacctttatcatcaattgaaaatatagtaaaggaagcagctaaatatgatatagcagttatggtagatgaagcttatggtgaatacatgccaaaagaaaattcagctgtcaagcttctaaataattatgataatgtaattgctttaaaaacattttcaaaaggatttggtttagcaggactaagagcaggatatgcagttcttccagaacaacttgttagccctattaaaaagatttctactccttacgaagtgtctgaaatatctcgtagtattgcagcaaatttattagatgatgttcaatttatagaagaattaaaagaaaaaacaaaagatataaaaaatcaattactaattccatggaaaaaccttaatatagctgaaactagtgatactgtatcaattatgacagttgaacataaaaacaaggacatagatttacaacaagagtttgctaaattaaaaataagagttatatctggaagtgattttactggacttgataaaaatttcataagatttagaatgcctgaagaaaaagaattacctgaagttataaaagcattccaaataatcgataatatagaataaattagactatttataaaaggcatattgttaaaatcaatatgccctttaattttttgattattttacttcacttctatttattaatttgttaagttccattaatattgatgaaattaatgctaaccctaggcaaatccccaactggtacaatccaaacgttgttggtatagagaatattcctcttagcactggtattagtgttaaagagtaaagcccaagacagactaaaactgctcctataacgtatttattgctgaaaaaacctaattttattactgtttgattattagaacgtgcaggtaatgtttgcattattctagctaatatcaatgttgaaaatgccattgctactccaagttctggagatacttgtaatcctatatattgtgcaattattgtaactacacctattatacaacctcttatagcaactgccttcaatgttcctcctgctagtatactttcatccgggtgtctaggaggtttattcattatatttttttctgacttttcaaaccctaatgcaattgctggtaaagagtcatttactaagtttataaacaaaagttgtaaagctgtaaatggatttgaccaacctgcaaacactgcaaatactatggatactatagctcctaagtttcctgcaaatagataagtaattgattttattatattactgtatactgttctaccaacttcaacagcatttactatacttgcaaagttatcatcaaccaataccatagcagaagcatcttttgctacatcagtaccacttcccataccaattcctatatctgcttgttttaatgcaggtgcatcattaacaccatcaccagtcattgctgttatattattcttatgttgccatgcttttactatacgaattttattttctggcgagactctggcatatacacttatattttctagtttttcatatagttgttcttcactcaaagcatcaagctcttttccagtaagagccaagtctccttcttccattataccaatctcttttgcaattgctgctgctgttgttttatggtcaccagttatcataacagtttttataccagcactctttgcctcttttactgcatccattacttcttctcttggtgggtctatcattgccattattccaaccaatgtcatgtcatgttcgtcatcaattgaaggtataaaatcttcttctgggacatcttttattgcaaaagctaatactctaagtgctctatttgaaaactcttcatttttatgtttatattcttctattatctcatctgttatatctacttttgaaccatttttcaaagcatatttacatctactaaacacaatatctggagcaccttttgtaaacattatataatctccatatatactatttacagtagacataagctttctgtctgaatcaaatggtatttcatttattctgatatacttacttcttaatttatcataatctaaatcatttttacttgaataatttattaaagccacttctgttgggtcaccaacttctttaccatcactagttatatgagagtcattacacaatgtagaaaccatagtcaataatttagcatgataagaatagtttactttttctttatctaactcatcattattagttccatacatataataatcaactactgtcattttattttgtgtaagagtacctgttttatcagtacatattacacttgttgaacctaaagtttctactgctggtaattttcttattatggcttgtttttttgccatactatttgttccaacagccaatactatagtgactattgatgatagagcttctggtatagctgctactgctactgctacagagaacatgaatgaatctaaaataatttgtgtcatttctccatttccagccataaagtaatttcttgctacttgaattataaatattaaaagagcaagtattacaatacctacaccaagttttttactaaaatcctctattttttgttgcaatggtgtaagtttattttcagcactttctaaaagcccagctattttacccatctcagtatccatacctgttccagtcactacaaaagaacctctaccataaacaactacagcaccactaaataccatatttttctggtcacctaaacttacatcttcacttattttttctgtatgctttaaaactggttctgattctccagttaacatcccttctacaaccttgagagattgtgcttctataagccttccatctgctggtatgtaatcgccagcttctaagaatacaatatctccaactactagattttttgctggaattgtcatttttttattgtctcttattacctttgcgtttggtgcagataaatttttcaaactttctaatgaactttctgctttttttgtttgtacaacacccagaacagagtttataataataactgcaaaaattattatagactccactgtttcacctaaaaatatttgtactaaagcagctatcaatagaattattactaatgggtctttaaaactttctaggaaaagcttataagtaggaaccttatctgcttcttttaattcattagctccatttttttccaacaactcttctgctctttctttactcaaaccagataaacttgagtctaaatttttaattacttcttgataagtacttttgtaagacatttgttgccctcctcttcaataaatttattttatgtttgggggctcttatgtatacttgaaatttaaatttttttaaataaaaattccttgaataaaaaaagaccccaaaacaaacatacctaatgcttattttgaaggtcttgctatcaaggaatcccttgctaattaaccgagtatttctactgtcttgacgattaattaccactttcgtgtaagctactccccttcgagtagttatcttaaattgtatttacattatatcactttacacagctaatagtctaggttattttttattttaacctaattttaacaaaccatctcttaatttatatgtaaatattcttctaaagtcaaattattcattgcaaagtttttgctatgttcagttccaacatatctatagtgccaagattcatacatatatcctgttatattctctttaccttctggatatctaagtataaaaccatatttatatgcattttcatacaaccacttagcttcttttgtattgttgaactttttatttgcccaacaagactggtcatctcctccaatatcaaaagcaagtccagtttgatgctcactctctccaggtttagctgaaaatctatttgcttctttttctccatgttcttttacatatgatttaaataatctatcttgatattcataacttctatatgtactaaaagcttttaaatttaatcctgacttttgagcatctttattcattttataaaaagcatctctcgcttcactgctttcctgaggagaataatctttgggcaaactatattttttattcgctactataatattgtttattgataatacatttacgcctttcctgtatttacttaattcagctgtcataattttacttccttcgctagagctatcaataaacatttctacaaaaactataaatagagcaaaaattattgctacacaaattttctttttcatatactacacctccataattggaatttgatacagaaaaatttcaagacattctctttcatactataatcataccactaatttattgcaacttctttaaacaattcttaagaaactcttaagtttcttttttatacgactaaaaataacaacaaatttttcaaaaatttcatattacagtctatatattgattttttttccaaatgatgtataatatatttattaaaacttgtaggtactatatagtactaaacgtttttgcgtgaaaggagataataaagtgacagaaaaacaaaggctcattataaatattgcacaaaaaatttttgaccaaaaaggttttcaaaatacttcaatatcggatgttgtaaaagagtgtaaaatgtctaaagctactttttacaagcattttgaaactaaggaaagttttatctgcgaaataatcaattattatgatgaaaagtttttagaaattatacattccataaacgaaaataatgacattccatcatcagaaaagttaaacagaaagataattgctgtatggaaaaatattttttctagaactaccataaatacctatataagagaaaatttttctgaagagcaacgtaaggctacaagtaaattgcaaacaaaatcacgagctaacttattgaatgaatacaaattaagcttatttgataactatggtgataaaatagaaaaaattatatttgatttagttttcttattggatgctctaattcatcagtttatatacattattcatgtacaaaaaagagaaataaatgtatactttattgccaaatttactatacaaattctagatttagttgtagaaaatatggataatctaaatcctttaattgaaaaatcaatgtttttacataaacaagaagatgaagtttacttttcccttcataataaatcgctattttttaaaacgatacaagatatagaagaactaatcaaaactgatacttctctccttgaaaatcctaaattactagaagcaataaaaaaattatacgtcgagggaaaaaatcaacaatatgattctttaattatggatgcaatgattgcatatttagaaaaagaagacactttaagaccaaaagtacttttattgaacagcattaaaaatcaattaaaaaaggagacgttataaattatggaaacccaaagtaacaataaaaaaggaaatttaataatagcaattgtaatgactggtgcttttataagttctctcagtcaaacactattgtcaacagcattacctaatataatgtcagattttaaaattactgctgatattggtcagtggttaacaacaatttatctacttattgcaggtattattgtacccacaacagcttatttaataaatcgatttagtactagaaagttatttattacatcaatgtctatcttttctataggatgtattattgcacttttttctaataatttttcaactatgttgattgctcgtgtgttgcaggcaatgggttctggttctctaatgccacttttacaagttattatactctatttatgccctgaggaaaaacgtggtgcagctatgagtttagttggtattacagtaggatttgctccagcaataggtccaactttatcaggatggttagtagattcatttggttggcatagtttatttctgtttctttcccctattgctatattagatgttatactatcatttattctattaagaaatgttggggaaactcaaaaactaaagttagatataccttcaatagtactatcatctctaggttttggtggtttattaattggatttactaatcaaggtaattatgggtggactaatattgccacatatttaccaatattaataggaattatgtcattaattttatttacattgcgtcaattaaaatctaaagaaccttttttagaattgagggtttttaaaaataaaccatttcttatttctacaatattaattatgattgtatatgcctcaatgatgtctgctacattaatgattcctctgtacgttcaatctgtaagaggattttctgcattatcttcaggttcattaatgttacctggtgctatattgatggttgtactcaatccaattgcaggacgtcatttagataaatatggacctcatgctctatcaatattaggaacaggatgtttgtttttaggaactttatccttcgcttttttaggcagagatacatctttaattcatgtgtcattgatgtattgtattcgtatgattggtatttcaatggttttaatgccattaactacatggggaattaaaacattagatagagaacttatatctcatgccacagcaattaataacacactccgtcagatatctggagctataggttctgctatacttattactataatgacaagtgctactaagaaagctcatatgagttcaaacatgctgtctaacattcatggaatagatgttgcattttcaatagcagctactcttgcatttactggtttaattgtatctatatgttttataaaaagacatcaaattattagaagttaatacagaaaaggagttatcctatgaacaatttaagtttgctctatgataactcctttttattcattttaaccagtacagttttaattattctatatatttcctatatagttacctcttaaacactcattcgtttttatcaatataattgtttctagccttacatacattttttgtcattatttttctgataagatgtacatatatgaaattttttaattttgacatatgttgtgaatgagtagaaaaaaatacatctggtgatggaaaaataccataatcatacacgatagcttctttttggataaaagtatctttaccatcccaatcaatagatgtatttttcaaatcatttgtagctattgcatactttttaaacgttccaccatgattaaaaaacttcttctgaattgcttctaaatattttttatcagttatgacaccctccagagcaatccacctatcttgataaaatacctctacccaagtatgaagaatatattttggtgctaatagtgaaatcaatttggatgtagcacctcgttgaaaatcttttgttacatcaaaagcatgaagcctacaagggatattcactgcacgtaataatgccattaaaagagtagcttttgtattgcattgtcccataccatcatttaatacctgtgttgcgcttaacatatcagaagcattatatccaaataaaatatcattctgtacaaactcataaatagattttattttatgaaaatcatctaattccaaccaattctttgatgataccaaaagcttaagttgtggttcattataatttaacatttttgtttcctctaaatattctttattcataacaaagcccctttcttagtacaacttcattatataacgagaatatttaatatactttcaaaaattcgctatctttcaaagataaagaaacaggcattcccatcattcgcttaactgtccctgcaaagtgtgatggagtatcgaatccagcagtcatagaagcttcggtaacatttttcccagaaagtaattctctaaaagcacactccatttgatgaaataagatatagctttttaaaggtatccctatttgttctttaaacagatgtgataatctacttgctgatagggacactttatctgcaaaacttgaaatagtatgattatcacaattacaagtacgtaataaattgagcaattcagtaattctgtcatcataatgtttgagagttataggtatattcaaatagttattaagcatttccataaatcttaaatattgttctttactagagttatatatcaaaaaagttccttgttgacgtaatttctctaatccatcattgtcacatatccagtagccaaaatcattcatttttgaggtaagctgttctgcatatatagatgtaggttcaataatagcagagtaataaactttttttcttgctgaaaatgaatgagagatatttttatctactatgatacaattacatttaactaatttttcattgactgttatttcaatgctgtcttctatccctaagaacagttgtaacatgcagtggctatgtgtatctgcctctaaattatttgtaatcatgccaatcctatcttcttgccaaaaaattttatttataatgttcattgcatcaccccattcttctaaaaatatcactctttattttaatatattgccatatgtttgtgaatacattttgataaaagactctgaaaacatatctaattattaaataaaaaccctttcttttatcctactatcttaattctggccagtattccttattaacttctatcatttcatccaaaatttctttagcaacattcatacttggaatagttttatttaatgtgaatgcttgtaaagctttttcataactattttctatataagcttctactatcaatttttcactgttaagttgttgcatcattaatccttgttggaatagaggtattggacctcgagcaataacttctggaccatctttaccaatatatgctggaatttctaccattgcatcatatggcatgtttggtatagctccacgattttcagttataactaaaaaacgactacgtgtatcatttttaattgaaactgccaaatcactaatccaatctccatgtgaacctgcataaaatactttttcagaaatttctccagtttctaagtaatgtctcacaccttcaaataagtctttttcacggctttccataacctcatttgcacgagtacgatttatgtttgaatgttccactgtttctttacttaaaagatagtatgttaaataagtgtttggcagatattttgggaagctttctaacattgtataaacagattcccaaacatgtatccagctacttacagcatggcgatttcctgtactacgacttttatttaagttttctatataagattttggtaataatattttattttcttttatgtattccttaatctcttccattaagtctctatgtttataatctattgaagtaaaccagccaaaatgatttagaccaaaataatcatagcgtatattatgaacgtcattgatatttaatgactccgctatcatatctataatagctattggcatatcacagatatttataatccttgcatttggtcttaacttacgacaagcttcagaaacgattgcagcaggattagagtaatttaatatccaataatcttttttagcatatttctctacatcatcaataacctttatcattggttgtattgtacgcagtccgtatgccatccctccacaaccacaagtttcttgacctacacaaccatatttcaatggaattttttcatcctgctcacgcatttcatatttaccaacacgcatttgtgcaaatataaatgtagcatctgtatacgcttctttttcacaattagttacagttagtttaacatctgttttaacatcttcttttagtatccagttgacaactacagctactttatcttggcgttctttatcaatgtcaaataagcgaatttcctcaagctctaactctttttctcttaacgcaattgacttaacaatacctggagtaaatgtgcttcctccaccaacaatagtaataatcataataattattcctcctctataaattatatgtatctttaataaatagtaaacagcacttaaagctgttatttacccttgctatataaatatatatctttaataagcttctaaaaaatcttctactgcacgtcttacctcatgcacatgaagtccaaaaattatttgtatatcttttcctttccttacaatcccgctatttggcgttaaattaattatatcttcattaatcttactttcatcttttacattaacacgtaatctagtgatgcaattttctactgtattaatattttcttttccgcctaacccatcaattatattttctatacctgcatctaaattaagttgttttgattgttcttcgcctgtagctgtactctcatcttcacgacctggagttttataattaaatttcttaattaaaaaactaaatactacaaaatatacaataatttgtgcaagtcctaatatcatcattactggccagtgtgttttttctacacctactgtagtattcattataattgatactaataagttccctccacataatgcagtaacatcaaatatttttaataaagctataaaaagaccagctataactgcatgtacaaagaataaaagtggtgcacagaatacaaacataaagtctaatggttctgttacagaggctaatactgccgtaattattagtggaataatcgttgccttaactttcttcttattttgcttatatgcagtataaataaaggcagctcctatacctatataaccaaacatctttgtaaatccagttgccatgtagtatatactatctgagaaacgctcaactggtaaattcatttctgtcataactatagcataggctcctgaaactgtatctgcaccaactttaagcactcctcctaaatcagaaaactgaaatggtgtatagattaaatgatgaagtccagttggtactaatattctctctaaaaaaccatataagaataaaccaaatgtacctgtatctttgatgacatttgcaagagaagctattccttgttgagctaatggccatataaagttactcacaactccaattaaaatggatacaaagaacatgcatataaaactaaaatttgctcccgagtatatctgtaaagctcctttaaatgttttgttgcttgtacgattaaatacatatccagctatacaccctaaaataattccaccaaatacacttgtatctacaacttgaatacctaaaatagtagcttgtccagtccctatcagtccaagcatcttgctttcttttgctagttgacctagtgatgttaacatagtgttggaagctgtaaggtatattatataactcataaatcctattaacgctgctttgtgcttctctttttttgctagtgcagcaggaatacctatagcaaatataacagcaagattattaataatagccattatacagttataaattaggcttccaaatatttgaattggctcccatttaaaaaatggaagtactcctaataacatatcatttgtaagtagtacacctaccaccattaatattcctgcactcgataaatacattaatggctgaaccattgcctttgcaaatgtttccagtcctccaagtagtttttctttcaatcttatccccccctaaaattatatatttctattactaattcatctcattcttataagatttttgttaggtgtagtagtagataaattttttcaggtttatctaatttatacctaaactccttttcaatatatacatttaacttttctaaatattctttatttttaggatgattgttaattaaataatcatacatttcaatcattttatcatcctgacaaatttcattcttaaaaattctttgagcaagaaatttaagatgagttctaaaacgtaatgtacttaaactcgattcgtctaattctaatccataacattctttaatcaaatcaatactaccttttacaaattttaaagtatcatatgccaaattatcatttgattgtaaattgacaaaatgtaaagctatgtaacctgcttcatcttcaggcaaatggatatgacatactctatatataatttctaaagcttttactcctaattcaaactcttttgaatacatcatctttatatccaaaagcattaaattaggtaaaaaaacattatttttcattctatctattgcaaaactaatatgttccactaaagataatatccctttattattaaattttccctcatttcctggtataagacttataatttgttgtgaagcatccatcacttctggactaacattttttaataattctaaaaattttgtttgcatgtggtcttgaacataataaatcttttctattttatcttcattaactttatctcctggacgtttattaaaacctataccaagacctagtaaaatagcttctttcctatcattagttactgtagataatgcattattattaaagatttttactactctcatattgaattaatcccttcctattatttcataatttcaataacagtatcttgccctgcaacaacttcattttctaccatgcaatttatttctgaaaattcgctatgatttaatacaattattattgttgtacaatcaattccctgagaatttattttttctctttcaaaacttattattggactaccttttttaacagtatctccttgagacacttcatttttaaacccctcaccctgtaaattaactgtatcaattcctatgtggactaatatttcaacaccctcatctgagaccataccaaaggcatgctttgattctgtaagcacagttactttaccattacaaggggctacaacaacattactattaggaataattgcaactccatctcccattaacttttttgaaaacacagaatcgtttactttctcaatattaatgctgttaccactcactactgcatgtaacttatagcttttatttttcttgaaaaaatttaacacaatacttcctccttattaaatagatttttgaatttcaatacaaaaaaggcatgaatcctcaggataaaaatatccaagaactcatgcctaatttaatagttacacgtttcaaattatatactcattataaaaccttctcaaaaatattgcaatatttattttaattttattttttaattcgacaatatttatcatgttctttattgtgatttatttttttataaaaagactgaatcactagaatatagtttttcagccttttcaaattaaaaatattgtatttttataatacagctattacttctatttcaactttaacgtcttttggtaatctagcaacttctacacaagctcttgctggtttattttctccaaaatattcagcataaacttcgtttatagccccaaattcattcatatcttttataaatactgtagtcttaactacatttgaaaaatcagctccactttcagctaatatagctttaagattttttaaagattgagcagtttgagcttgtacatctccttcaactacttccatagtctctggtacaagaggaacttgtccagatacaaataataagtttccagcttttatagcttgagaatatggtcctaaagctgctggtgcatcattagtatgtattacttcatgtttcattttaaaatcctcctaattcgttaatctaatacacataaaatgtatcttcatacactattatactatttttcttgtatattatatacactttttattataattctataattttaaaacctttttcttctatagctttctttattctagctatatggtcataatctattgtctctaatataaattccgcactttgttttcctagagcttcccctgctgataatttaccttgattagcacttaaaatgtttccaccattctcacttattattctagttaactcagcaaagtttcctggcttatcttccataattgtactaaatgaatatcttcttccttctttagctaaagcaacacctattattctatataacgtatttatgtctatattaccaccagatattatacaaactacattttcatcttttgctggtacatacttaccacttaatatagcagctgtacatacagcaccagcaccttctgaaactattttttgactttccatcataaataatattgattctgcaatttctgtctcttcaaccactactatttcatcaaccaattcatttattatttcaaaagttaaatctcctggagttttaacagctataccatcagctattgtagtatcattaaatgctgttgttacttttccattttttattgactctttcattgaaggtatatttgcagtttgaacaccgactatttttacattaggatttaatgcttttgctgcaacagcaacaccagagatgattcctcctccaccaactgggcatagtatagtatcaactttattgtctaattgttcgaaaatttcaagagatatagttccttgtcctgctataacatacttatcattgaatggatgtaagaaagttgctcctgtttctttttgtatttcaacagcttttgcatatgcatcatcataaaccgcaccatttaaaactacttctgctccataacctttagttgcactaacttttgctaaaggcgcagttgctggcattactattgtagattttataccagtcatttttgctcccaatgcaactccttgagcatgattccctgcacttgaagctataactccatttgccttttcttcatctgttaaactcgctattttgttacaagctcctcttaatttaaaagaacctgttttttgaagattctcacatttatagaacacatttgctcctgttttttcgctaagtttaacactttcaagtaagtcagttctttttactatgttcttaatggtctctctagcctctttcacatctgttaaggtaacattcatcatttcattccactcccgtaaatccaatttttgtttattactttctatataattctatatcttttttttttaaaaatcaacatgtaaacgatttttataattttttaattaatcacaaaaaacctaaaaatacaacaattgcatacaataaacatatatcttcaattcatttaaattacattaaatgataatttaaaaatattttttacattcttattaaagcaataatatatactttattatttttattaaaatttatattttatattattttatttacccaaaatctatttttttgattttatttaacattattaagattaataaattaataaaatacatgtcttactaaacaacttcaatataaaagaaagttttactttatttttattcaaaattagaaaactatacatatataataaaatacaataaaaaaactaaggtgataattaaattgaatatttattttatataacaatcattttttattaaaaggtattttttattttaacatatatttaataaggctaaatagagttattattttaatttcatactttactttttctataaacctattataattaaagtataatcatttttgcaacttgtttattttattataaaaatgtgaaacttattacataaggaggaatttaacatgaaaaatcatacttataaagaaatcaaaaacatatatggaaaaataagcccttttgaatttaaggacaaattaatagatattgcaaaatacactgcaaaagaaaataacagagaattacttgatgcaggtcgtggaaatccaaactggacttgttcaactgctagagaagccttttttacttttggtcatttcgctattactgaaactcgttctaattgggatttaggtcatttggctggaatgcctcaaaaaaagggtattaaagaaagattttttaaatttataaatgaaaatatagatatgcctggagcatatttagctagagatattataaactttggtataaatgaacttggatttgatggagatgaatttgttcatgaactagctgatggaattattggtgataactatccacttccagatagaatgttacctcatatggaaaaaatagtacacgattacctagttcaagaaatgaaatatgatatatcaggtaaatatggtgatgtagaaatttttgctgttgaaggtgctacagctgctatgtgctatatatttgattcattaatggcaaatgaacttctaaaaaaaggagatacaatagccttaatgactccaatatttacaccttatcttgaaatacctaaccttcctcgttacgactttaaagtggtaaatataaatgctaatgaagttgatgaaaaaggtgctcatacatggcaatatacaaaaaaagaattagagaaacttcgtgacaaatctattaaagctttattcgttgttaatcctaataatcctgcttctatagctatggatgaaatatcttgtaataatctaatagatgtaattgaaaattataataaagatttaatgataatatcagatgatgtatatggaacttttgtagaagatttttcatccttaatgtcaaaactaccttacaacactgttggagtatattcttattcaaaatattttggagttacaggatggagacttggtacatttgcccttcataagaaaaatgtttttgataagaaaataaatgatttaactggagaattaaaaaaatcagtagataagcgttacagtgatatgagtcttaacccttctagtctttcatttatggaaagagttgttgctgatagcagacttgttgctctcaaccatactgctggtctttctactccacagcaagtacaaatggcgtttttctctgcttttgcattgattgacaaagtagatgcctacaaaaaactcaatatgagtatctgccatagacgtcaaaaactattatttgaagctttagagcttccaattaatgaaaacaaaaacaatgctgcatattacactcaatttgatattgaagaatgggctaaattaaactacggagaagacttatttaaatttataagtaaaactgcatctccagtagatgttctttataaattagctaatgactattcagtagttttacttagtggaaatggattctatggccctgaatggtcaattagaatatctctagcaaatctatatgatgaagcttatactaagataggaaaagccataagagagatattaaatggttatatcgttgaatggcaaaaaattaagaaataattatattacactgaaatatctaaattatatgaataaaagagtttatgtagaccttaactactttttttgatataatcctatcggaattataaattttatttatgaaaggcagagaatcgtatgagtattaagaaaaaagttgccatagtttttactggtggaactatatctatgacagtagatgataaagtcggagcagctataccaactttatcaggtgaacaaatactatcaatggttaccaacattgataaagttgcagatgttgaagtttttaattttgatgaaattccaggacctcacataacaccttatagaatgatggaattgaaaaattatgtaaatgatttattagcaagaaaagatattacaggtgttgtaataacacatggtacagatagtttagaggaaacagcttattttctagaccttacaattgacaacatcaaacctgtaatagtcacaggtgctatgagaagtagttctgaacttggatatgatggttcaagtaatttatctgcatcagtttgtactgcagtatccaaagatgctatgggaaaaggagtccttgtagttttaaacaatgaagtattattagcttctgaagctactaaaacaaatactctttctctaaatacatttaaatctctaactagtggtccattaggaataattgactgcaacgaacttgtccttacaagagatattgtaaatagaacaattatagatactgataaggtagaatctaaagttgccttatttaaagcatatgtaggagaaaatgctgactttataagatttgctgttgatagtggttataaaggtatagttattgaggcaatgggtataggtaatattcctcctcaaatgctttctggagttgaatatgctagagaaaaaggacttcctgtagttatagtttctagatgtcattcaggtagagtattcgatagttatggttactttggttctggtagagatttaaaaaatcttggttgtatatttggtggggacttgccaggtcaaaaagctagaataaaacttatcttagcacttggaaaaactgataaccttgatgaaatcaaagatttctttgaaaaaggaatctattgctaattctaataacttctatttaattatttagttcagtttacaagaaaatacacacaaaccataaaatgagatgttgacaacataacagacagtatgctcctgtaaaaggtaacatactatctgttatattgtctggattcccaaattagctatttggaacttaactaaaaaatcctaatataagggcaactattataatggcaatcggaatacatactgtgtaatcctgttccatagagtcatcatctgaatgtagttttacaattcgcaatttagcaatcagtttgaagcagaaatagcctattattgttccaattacattcgtgagtaagtcgtctatatcggttgctctgtgtaacgtaaaaagctgaatagtttcgataaagagagataatccaaaaccaatcaagaatgtatttctcaaccgttcaaaggttttgctgataagcggacataaaaaacctaatggaacaaaaagtaaaatattcaaaataaaactcaaactaaatccatcactaaaaggaataagatttatgtttggattaaagaacgtttcccctaactgtgacagtcttatatattcactgaatgtagggataccaacaatatgcgatagtgttaaacataagtagtaatacattgccagtgataaaatagatgtttttacctttggaatatcactatttttcttgaatattacaactaagaaaataccaatcaagataattcccaacaagaaaataggattaattaacaataaatctttgatagcttcaaacagactgagttgaatttctacacttgattgattatttgatacagtctccatttgtacacaccccctcataacatttcaattatttctaaaaaacaaaatagaagataaatcttaaaatcatcctatcaaaatttttaaatttgcctttatcagtttataccaccagttaattcctgtcttacttctgtatggtattcttgggattctttcatcaaattagacaaaaaaatggttaccatatcaataaactggttacgctccatatctcctgaagcaaacatcccctgagaataaatccgtatcaggaatctccacatctactgcacctatcacaagtcatttgataacatcctcaaacaatcccaacttggatatatcagcaacacccattagaatactactgctgaccatccttgttttcctggtgataattttaatcaactgggaagttgaaacgcctatcttttttgcaagttcctttttagaaacatggtagttattatatgaatctgaatctcgttgtctgggtgtttaagataaagcatagatacgcaccttttttgcctgttttcattatataaaaaaaattttaaaaatacaataattatatttttttcgtttaagcttagagcagttccttgatgaacaacactttagaaactgaataatttacataccacttaatacattaacacgatttaacattaattataataatatttaaaacaacaattagagtgtataagaatgaactttttagttctttaatcatttttttgtataaaatcaaatctatttttgtaatttcaacaatgaaaaaaggcttatctctattttgagacagcctcatttattttataaatttatatttttgttcatatttttgagttatttaacaactatatttactaattttttaggtacagctacaactttaactatagttttaccttcaactaatccttttattttttcatcttctaaagctaccttttccatctcatctttagatatatttgagttaacagttaattttcctctaacttttccattaacttgtacaacaacttctatttcatcttttactaaagctttttcgtcatatttaggccagtctatatcaaatacacttccttctttacctatcatagtccatagttcttcacctaaatgaggggcaaatggtgcaattatagttactatagtttgtacaccttcttttataactgcttcgtttatattatctaactctttatatttatacatatcatttattaattccataagagctgatatagcagtattaaatccgaatttttcacttaaatcagcagtaacttttttaagtgtagagtgtatagtatatctcatatccttatcttgggaatttaattctccaaactctacatcctttttaaccacatctgctaactcgtcaaccaatctataaaccctatttaagaatctaaagcatccatcaacaccttgctctgaccagtctaaatctctttctggtggtgctgcaaataatacgaaaagtcttgcagtatctgctccatactcatctattatatccataggagatactgtattccctttagacttactcattttagaaccatccataagtaccattccttgagtaagtaagtttttaaatggctcattgaagtctaccattcccatactcttaaatgcctttacaaaccatcttgcataaagcaaatgcattatagcatgttctactccacctatatattggtctactggatgccatctattaactaattccttactaaatggttcattttcattattgctatccacatatcttaagaaataccaagaagaatcaacgaatgtatccatagtatcaacttcccttctagctggttttccacagtgaggacaagttgttgacataaattgctttgaagtcgtaagtggagattctccctttccagtaaattcaacatctgttggtaaaagaactggtaaatcttcctttttaactggaactattccacattcatcacaataaaccacaggtataggacaaccccagtatctttgtcttgaaactaaccagtctctaagtctataattaattgttctctttcctctaccttctttttctaacttatcgattattccttcaaatccttctgaagcatctaatccattaaattcttctgaatttatcattttgttatcttctgttattacatcaattatgtctaaattatatttttcagcaaaatctctatctctttcatcatgtgctggaactgccattatagcacccgttccatactcaactaatacatagttagctatccatagaggaactttcttgccatttaaaggatttataacatatctacctataaacattccttctttttctacatcagctgctgttctttctatttctgtcatagtatgcattttttgaacaaaagcttcaacatctgcttcatattcagtccctgcaaccaattctttaactaattcatgctctggagcaagtaccatataagtaactccataagttgtgtctggtctagttgtaaatactgtcatagatttatcagttccatctatatcaaaaactaaatctgctcctgtacttttacctatccaatttttttgcattgttttaactttttctggccatccatctaatgtatctaagtcattaagtaattcttctgcaaattcagtagtcttaaaataccattgttctaaatctttctttaatactgttgctttacatctctcacatgctccttgaacaacttgctcatttgcaagaacagtctcacaagaaggacaccagttaacatatgattttttcttatatgcaagcccatgctctaaaaacttcaaaaatatttcttgtgtaaatctatagtattctggagttgaagttgcaacttctttatcccaatcataactaatacctaataaatttaattgctctttcatttcttctatattttccattgtccatttatgcggatgtattccatgttttatagctgcattttcagctggtaatccaaaagaatcccatcccattggatgaagtacattatatccttccatttttttgaatcttgcgacaacatcacctatagaataatttctaacatgtcccatgtgtatttttccagatggataagggaacatttctaatgtgtaataattaggtttttcagtttgtgcagtatccattttatactgattattatctttccaaattttttgccatttcgattctacttctttaaaattatatacgctcatattttgcctcctatttttaattgtgtataactaccttatttagtattatttacttataatttccaaataattctttgaaaataaaaaatcctcgtcactaaacttacgtttagggacgaggataaatcttcgcggtaccaccctaattagcctactacatatatagactctcttagatagcttttaatccagccatggagaatagattttaatctagtaagttcaaagttatataatattagttctcaccttccactaactctctgaaaaaatataatcttttactgctctagtctattcaatttaatataatttttgaaattttctaattataataacatatattatcatgtttatgctaatgtgtcaatatctatataaggtgcatctttccataatttttctaaattataaaaccctctattttcctcattaaatacatgaaccattatgtctccataatcaaggagtacccaagtttgagttccttgtccttctttacctcttggctctaatcctagttttgctaattcatcttccacattgtcagcaatagcttttacctgtctctgagaagatgctgtagtaataataaaataatcacacaaactagaaacttttcctatatttattataactgtatcttgacccagtttatcttctatggcatcatatgctatttttgtcatttgttccactgtcatataaaaattcctcactttcctaattaaaatacacttagttattgtaacatattaatacgattttgtaacatagtcaaatttaaatttattaatatgtttgcctttatatagcttttttataataacttttctttaattagatagtttcttgccataactgttcttggatgtatctcttcttttttattgatgacaaacattaaagtattattaaaagaagttaaaagtgcttcatcaagcttccctccatatgctaattctcttaatgtatctacaactggaaattttcttccttcttcaattaaatcagctatgtaaattattttttctaaaagagacatgtcctctctccctgttgtatgatatttgattgcatttataatatcttcatcttctacttcaaattcatactcgcatatgtacgccccaattacactatgagacaaggaacgatttccatcctctattgggtctaaatatatttcatacttatttacataatcctctatttccttgtcacttaaatactttgcacaatcatgaatcattcctgctaagtaagctttttctttgtcacatccataaatctcacataatttttcagcacattttgcaacatttcttgaatggctaagcctccccactggtagcatttgatttagtctttggttaatattttctaagttcatttaatcatctccatattgatatagtttattttcatataaataattttctacattttcgggtactaagtaacgtattgacttgccttcatttagctgttcccttatatatgtggacgatatatccagtgatggaacataaactgttataatgtcagcattatacttcttagttagtttttctatagtctcttgtgaccttaacaaactaattcctggtctagttgcggctataaaagtagctaactcaaagtttttctttacatctttccactcttcaacactacaaattgcatctgcacctgttataaaataaatgtctgcatttttgtattttttctttaagtattttaatgtatctattgtataagtccttttctttctttcgatttctacttttgaaactaaaaaatcttcgttgctttcagttgctagaagtgtcatattatatctatcatacttatctgtagtgatacataatttatgtggtggatttcctgatggtataaagattattttgtcaatgtcatacttgtctctaataaattctgctgttgctaaatgagcatagtgtatagggtcaaaagtacctcccaatatacctattttgattttgcctttatggcgattaaatttctctagtttttcagtatttttcaactctgccatcttaactagattttcacttctcatattttgtctccttttaatgttataatactattgtaccattattttttatttcttaaagcttataatttgtttttttgggtatataattatatttatatgctaaaaaacactttaaaaaataattatttaacatgattctgctttactttttaataaaaataactttttactattttgtcttaattttgataaaatataacatacaaatataagttttttgttaaattttattagttgcttttgttaatataattacatataaaaaaggaggacttatgggtataattacaaaaatagaacaacaaaaaagaaatgatgatagagttaatatttatgtagatgataaattttttattgctatatttaaagaacttgtttatacatttaatttaaaaaaagggaatgaaataaatgaagaagaattaaaacctattttagatgatgaaatgtatataaaagctaaaaataaagcattaaatattttatctcatgctgaccaatctgaaaaaaaattaaaagaaaaactatcatcagaatttgatgaaaatataattgagagggtcatagattttcttaaaagttataatctcgtaaatgacagtgtattagctcaaaaaattgttaacacaaatgttaacctaaataaatgtggcaaaaacagaattaagcagaatttatataataaaggtatcaatagaagtacaatcaatgaagcagtatctgaattagacaaggacactgaatttgaaaatgctatgtatctagcaaaaaaaaggtatgaaagagtaaagaaagaagataaaaagaaaatatatcaaaaaatttctcaacatctttcctataaaggctttgattatgatattattaaaagagttttaaacaaacttttaaattttgatgaatacgatatataagtataaatactagggaggtaaattatgaaattaatcattggtggcttaagctttttattaggattatataatatatatcaattatacagagaagatagtatgagataaatattattttttaaatgtaatatttattatggaggagaaatacaatgaaaagtcaaaaaagatttaaaattttagatattgatgtatacctacaaccatttgaatctgatataaaaaagcgaatgaaacattatgaggatatgaaatcaaaaacattgaaaaactataaagattttagttcttttgcaaatgctcatctttactatggatttcatcagacaaatgatggattcttctatagggaatgggctccaaatgcagatagtttgtcactaattggtgactttaataattggaatagaaaatctcatcctctaagaaaaattgggtctggtaattgggaaatatttattcctggtcaaaatagcttacctcacaaatcagaggtaaaggtacaagttactgcaaatggaaaaacatttgaccgtataccattatatataaaaagagtaattcaaaaagattttggtggatttaatggacaaatatggcaaccaaaaactccatttatctggactgacaataattttgacttaaaaaacataacttctccactaatctatgaatgtcatataggtatgtctactgaaagcgaatctattggaacttataatgaatttactgaaaaaatacttcctaagataaaaaaagctggatacaataccattcagcttatggctattatggaacatccatattatgcatcttttggataccaagtttcaaacttttatgcaatctcatctaggtttggtactcctgaagacttaaaaaacctcataaacactgctcattcaatggggattgctgttttattggatttagttcattctcatgctgtaaagaatactttagaaggaataaatgagtttgatggaagtgaacatcaatttttccactcaggttcaaagggaaatcatcctgcttggggtacaaaactttttaactatggtaaacctgaagtaatacattttttgctttcaaatataaaattttggttaaatgagtaccattttgatggctttaggtttgatggtgtgacttcaatgttatatcataaccatggtcttggagtttcatttgatagttatgaaaaatattttagtatgaatacagatattgaagctataacatatctccaatttgcaaatgaattaataaaagaaattaaacctaattcgataagtattgcagaagatatgagtggaatgcctggtatgtgtatccctataaaagacggcggaattggatttgactatagactcgcaatgggagtacctgatttttggataaaaactatctctaacttatctgatgaagactgggatttgggaaaaatgtggtatgaacttactactagacgacctggagaaaaaaatataggatattgtgaatcccatgaccaagcattagttggcgataaaacaattattttttggctagctgacaaggaaatgtactggaatatggaaataaactcaaataaccatgttatcaatagagcaatatctcttattaaattaattaaattaataactttttctctagcaggtgaaggatatctaaattttatgggaaatgaatttggacatcctgagtggattgattttccacgagaaggcaacaattggagctataagtatgccagaagacaatggagcctttcagaagataacaacttaaagtataaacaattattaaattttgataaatctatgctcgaacttacaaaatacagtgatatttttatccaaaatagtcatgaacttatacatatggataatgataaaaagattttggtgtacagtaagggcaaatatttatttatatttaatttccaccctaatctaatacaatcagttgatatttcaaagtttcaaaatacaaactacaaaacgatattaaatactgatatggtagagtttggaggaaacacaaaaaaagaaaacttaagagattatgatgtatactttagctcaactcctccttcttctaaaatgcctattgcctctcgtacagcaatagtacttttagataatggcatttaaatatgagccaaatatattaggaaactgcaaatgtagtccagtataaggcaaaaaaataaaataatgaaagcatggcaatatacctgttcaacatgctaaaaagacatattgacaaatcagtattaagccttttagctcccaaatatgacattattataatccacactctaacagtttgttggtttttctagtatataacactcatattaaagtaaacactaaaagccaaataacaatttaaatacaaaatgttatttggctaatttagtttgatactatttaactatcttttacattcagttctataatttccaacttttaatttgtggtattatattcatcttaacagtttgattctttaaagcttttctaaatttctcagttgaagaatctttaaacattttactagaagcactcttgaggtcttctatagattcccaatgttgtatcataatccacttttgagacttttcatcatataaaagctcagtatcaataaaaccagattgaatagaatgaaattttaattctaagtcatttacaatttctataaactcttcttttgataaattttcttccacattaaactcaactatttctgtaataattttcatatgtaaaacctccaatttattttcctatatcatatcaaaaaataaattggaggtattgtaaaaaatcgacagtataattataaatagttgtactttatattttctttaatcgtcttattctcaccaataaatttaattggtgacgtccctgaaaattttttaaattcttttataaagtgtgcttggtcatagtactcattttcataaataaaatcaaaaagttcattatctttataattataaataagttgactacttgccattttaaatctgtaaattctctttaaaatcttaggtgtataccctgtatattttaaacagattctttccaatgttttaatatttatatttgtattatcacaaaatgcttttatattgctatatctattatcatatataaatgaatttagaagctttacagatttatttgaaattaaatcttcttctaatatggataataacatttcttctaaatataaaacaattttttctactgattgtgttggatttaatgactcttccaattttttggcaaatagttctgatactgcttctaagtcaacaatttgtctgttaaactctgaaattggtatctttaaaaatggatagagaccaaatggataaaaagaaatccctataacacgtatatttccatgttgaataataaatccatgtttatcccttattccattaaaatgcatattactagcagtatagtcttgattttcaattttatattccataacatcagaaagattaagaataatatctatactgtctgtaggaagtaacttattatttaacagtatatttgattttgtttcaaaataccaaataaactttacccacggctttaaacgaacatttttgattgaatatcttgtaactgataacattgtgaactaacctctatactaaaattttttaattatgtactccatcttaatattatacagtataatttatgctatcataaattttagttcactttatatttattttatacattttttcaataccttagaaataggaagcgctattataagacctatcaatacttgcattaagttacctggtattgaagtaagaggtactataaaattaccataaagtataacttctgttatataatatccaaataacatccaaattgatgagacacatattcctattacattgattaaaaaattattcccattattaccatttgcccatgcaatctttccaagtaaataacccataactcctctaactataaaggtaaacggtgcccataaagtccacccagatattaaatcaaaaagtgacataccaatagctcctgataaagcaccttttttacttccaaatactattgctgatatgaacaacattgctgttcctaaatgcacaagcccaccatttatagatattggtaatcttatatttataaatttagttgcaataaatactaatgctattaatagtgaggtttccaccatgtctttcgttgtaaatttttgcttagctgtaacttccatactatatccccctatctattaaaaataatacttattaaataaattcaacaaattttcatttcctttgaatcctaatgcacttaaacttttatccaagacatttagtacatgctctattttatttagatttgcattctctcccatatgacctattcttaaaatagtatccatatattgatttagtgatgttgcaacaagtgtattataatttttaagcatataatcagtaagttttaaagctcctatactttcaggaatttttatagctgtgactgtattagaatatccttcttctaaaaatagttctagaccatattcctcaatagattttctaacactataagctatcttttcatgtctatctaatacattttctattccttcttctaatatattatcaagtgctttatcaagccccattatgtcacttattggcattgtataagggaagtattttttttcataatagccttcccatatatttaaattacaataaaaacctattacatcagtttttctattttttatacaattttttgcatcttgacttattccaactatagtaagtcctgctggtgcagaaatagctttttgtgaaccacctaatattatatctattttagattcatccacacttaatctttctcctaccatacctgctacagaatcaactacagttaatattccatattctttaagtaatggacatattttgcttacatcatttaatacgccagttggagtatcacaatgcactactgttgcatatttaaaattactatcctcatctaaaaatgctttcaattcatcaatatctatacttttagtatattcacttgaaaaaagcacatactccccaccatacattgttacaaaatctttaaaaccttctccatatataccattgtcaattacaagtactctatctcctttttcggtaagtgatgcacatgctgcttcaagccctaatattccttcaccactcaatatgtaaacatcgttttttgttccaactatattgccaaacttctcgcatgtctttttataaaattcaacaaaatcaatatctatatctggatttgttgttttttctgctcttgctaatcttacattttccctagtttcagttggtcctggtgcataattaatcttcttattcatatatatcagctcctatttattttctatacgattattatacaaaattttcattttatatggtacaattttatacttttttagaattgtaccgatacattttctaacatgaataatatcagtatattagatatattattgattacataataaaatacagagcaaacatccgtttaaattgtttgctctgtactatgctttaacctatttaattatgaatctctttaactatattttttatatgctttttgctagttaaactaaccacaaatatttgcattttattcactgtatcttactctatcaataagagattctttattaaaacttcgtcctatcaaataagttgttataaattgagctataagaatacacacaatcatcaacaagattggtactattggcaaagaatatgttgcataagataatccagtcttttttagaaatataacagcaatataccctaatatacctccaaataaaatacttcctatcatcattccagaagtgtaatacattgcctctgaattaagcattttcactaattgtttattagtaagaccaatagcttgaagcataccaagttctttttttctagtaactatgctagttatcattgtgttgacaagattcataaatccaatcacacctattatgcctgttagcgtgtatcccattatctttataaatgaaataacagccttatttgactcaattctactatctataaaatcagtctctaaaaatccattatttttagcaatcttcttgatactatctttgatttcttgatactttccttcttctgtatatattcccaagctactagttgaatcgtattttaaagttctatcaataaaatccttccctataccaaaacttggaacccccatagctattgcttgaactttaaattctttttttatctttttatctccatcatataaagttaatcttattttatctcctgcttttactcccatttcttttgctgtatcaacatgagtaattactatttcatctccagtttgcagtctttcaagatttatttttccatctattagattcttgtttaatgattttacatcattttcatttatactttgtaaaaggtcatacttaaattcaacatcatagtcctccataccaatttttacacttcttgcagattctattcttttaattccttccatgttctttatttgattaaaaaaatctttacttagaggattatccatttgtaaaatattcaaattatttttaggatttttatcactgttcatttcataaccagatagtctaacttctatatcataaggaaagtgttctcttgccattttctcagcatcaaaactttctaaagcagttgatactgttataaatatagttccactaagtataagtgatgccaatgtcatgtaagtacgttttttatttctttctaaattggcatgtgataatctctttagatttatatttttatatccttttctcttactcttattacttattttatttcctgtatatcttactgcgtcaacaatggatacttttgatgctactttcattggttttaaaagtgataaaacaacagatataaagcttattaccacaaccgataatataactggtaatcgtgatgattttacatctatatccataaatgattttattataatatttgcaagtacatagcctaaaattattcctattggtattgctattccggctaatataaacccttccttaaacactatattttttatttgtttcttagttgcaccaattgctctaagttttccaaattcttgaacttttgtaactattgaaatataaaatatattgtatattactaaaatactagataatacaattactaatcctacaaaacctccacccataatcgtttccatatctggttttaaagcatttatataattttcatttacagcagtattaatagtatcaagtcctatatcattagcaattttatctaatttttcttttgcttgctctattgataaattacttttatcattaaattttacataaatattaaaatcttcttgtgacatatctctagtatttctcatatataattctgatataatagcataataatatttacctgcttcagatatttcgctagtttttaagattccacttataacgaactctttttcaatttttttatcatttttatagtcattataagatatttttatcttttcacctaagtctttatttttataaccaagtgcctttaaagctccactatctaacacaatttcattctcttttgttggcaattttcctttgataagttcaaaactatttaatttcaaagcatcttcattcatgtatgctagagaaatatttgaatcatcttccagtttttcaacacctactccattcatttcaccagttaattcaacatctgcatgattactcaatatatcagcctgtttttcatctacatttgctaatataccttgataattacctgaatactttatagtattttctttttgatatgctcctgcatcaacaatataaattccaatagaagaaagcattaaagtagaaagtattatagtgattattattagaatactttttgatttattttgttttaaattactttttgctattttagtagtattaatcatttttatcaccaacctttgacaccctgccatcttctatgaatataactctatcagccatttgggctatactgtcatcatgagttatcataactagagtttgactgtacttcttagacatagattttaatatactcataacctcatcagatgttttagaatctaggtttccagttggttcatcagcaagtattatagctggtcttgtagctaatgctcttgctattgccaccctttgttgttgaccacctgataatgtatttggtaaaacgtcatgtttattttcaagtcctaatgatttcaaaagttcttttataaaagattcatctacttctctaccatctagaccgattggcaacactacattttcccatacattaagagatggaattaaattatagctttgaaatataaaccctatttttcttcttctaaacacagctagttcttcttcttttaatgtaaatatatttttattatctatatacaccttcccagatgtaggtatatcaagacctccaatcatatgtaaaagtgtactttttccagaacctgattttcctattattgcaacaaattcaccttcatttatttctaagttaacattgtccaaagctcttactaagttttctccttttccataatgctttgataaattttcagtatatagtattttcataaaattatcccctcattctaagttatattaccccatattttattaattttttatttctggagctgtttatacttatataataaatgtagaggcttacattttcctttcatttaatattacatagttgtaagaaacaaagaaaacttactccctatccctacttttgaagaaactataatatttccaccttgttcttctaaaatctttctacttaaatacaatcctaccccactaccttctacagattcaatttcatcagcagaacctctataaaaacgtttaaatatattattaaactcatttttttcaatccctatgccattatcctctattataattttaaagaaattagcagtttcttctacagatatatttatttctccatttacctgtgtgtactttacagcattatctaatacattaaaaatactctcctcagtccactttttatcatgtggtataattctactgttaaattcatttaaatttaatgttatacttttgctcttagccttaggggtaacactttttactgcatttagaatagtattttttatatcattatcttctttttttatgtttatcatgctaatttctaaccttgatatgttcactaaagaatttattaaattttctaatttatttatagaagccttattggttaataagaactcgttggcttcatcttcttctaatttttcttctataagtaatgtattgtataattttaaggatgctaaaggagtttttaattgatgagaaatatctgttactaatgattttacactttctttttctttttctaatttaataaactttatctttaaacttctattaagctcatatagacagttatttatcttactaaatgtaccttctttaaaatactcattatattctactagataaccagtttcttctgactcagtagtgtccttcaagtagttttcttgtgccatcttatctactataaaataaattttactcaatcttttatttatgtatcttataaaataatatattatacctataactactataaacatcattaaaaaaataaaaaatgattccttaaaaaaagattttaagtataaactaaaatttttatcatttgacattttattttccaatccatagccaaatttcttaaatgccttttctccagtagacaccttactataatcggaattataaatagaatttactatatctatttcatcattaggatatttttcaatcaatattccagcaatattttgagtattttttatttgatgttcatacaatttatgtaatctgctatattcaaaaagtataaatacaagggttactattagtacagataaaacagaatatacaataactcttctcattatataatcatctttcacacttaaaccatctttgaggttcatattttttagcatttttttatactcctttctccccacatatatccaacccctcttactgtttttatatatttaggttcagatggatttttttcaaccttttgtctaagtcttcttatatttactgcaatcgtattatcatctacaaaattaccactactatcccataaagattctaacagttgttctttagtcaatgtctgcatagaattttccatcaaatattttaatagttttgtctctgtcttacttaaaattatctcttcttccttatcatctgttcttataattaatttattttctatataataaaagaataaatcatcacaaactaatagagtataattttttactgtatttactcttttcataagcgcattcacttttgatattaataccatcaagctaaaaggctttgtgatataatcatctgcacctaaatcatatcctgtgacaatatccacctcttcatcaagagctgtcaacattattatgtaaacatcacttttctttctaatctcctcacaaaagtcaaaaccactaccatcaggtagacctatatcggaaataattaagcatatctcttcttttgcgaaaatattttttgcttcttctataccaaatgcactaaaaacattgtatccttctttttttaatttaaaactaattcctctatttaaagatttgtcatcttccaaaagtaatatattattcatccctatatcctccatcatcatatatactagctaaattatatcatactaataaaatcatttttttatcaatttgtaaatatatcagaagttgttaatatgatttcatttacttgaataaaaactaaaaatccccataatactatgccatttagtgtaattatttttcataaaatacaattttatttaaaaataatcatgttaaagcataaaacaaaggaaattagtatttatataactaatttcctttgctgtttactattatctaaaattaaattactatctactaattttgctcattaatttttattttgactttttatcctttaactctttttgattaaaattcaataaacatatcaatgtacttgaaactataaatataattatactatttgaaaaacctaaatctcctgttttaggagatttttctttagcttctcttttagatattccttgattagaactttctctagcacttgttttatctaagcttttatttttgtcactatcagagctttttatattattagatagattctcttcattatcattgatatttttttcattttcacttaatatcaaatcactctcatgattcttgcttattaactcatctttagatttaataccaattcttccatctacattttttgatatttcttttttgtactctatatattcaatgactgcactctctaaatttccaaattcctttagtattggctcttttgaaaaacaaggaaattcatctccacctgaggctatataatcattcgttgcaactacatactttttatttaaatctaatggctttccttctttttgaatacttgttattctttcgccttctttttgtttaggattaaagtagtatgaaattcctcccacttgcaaaaaggctgaacttttttctggataaagttttactccatgctccaatacatctttaatctgtgctcctgtaagttctttggtaactatagtattgctaaaaggaaatacatctacaatatctcttcttgttatattgcctttttctatcgtatctcgaatattccctccattaaataaagaaatatcagccttagttttatctagtaaaatgtcacttattaaattacccaaattagtttcttttgtccttacattttcatatgaaccatctagagtatttgtagttgcacctataactttatctaatattttttcttgttgttcttttatttcatcaacctttttacttacaacgtagtcaagcttatactttaatgcttcttcttttccaattaatctaactgatttattttctatttttatattttctacatcattagtatccaaagttagttttatctcgccaatattttctaaatattgtcctgcacttacaatcaatgtatcacccacttgtttaccattttcaaacttagtgtggctgtgtccatcaataatcaaatcaattccttgaacctcatttgctatatctatactatttggcttacttaaactatttgtaccaatatgacatattgcaactattacattggcaccttttccttttaattcatttacttgttctgttgcactttctataggatttttaaactctaatccttccacatttttaaatccagttttgttctttgtttcctgggttgagagtccaaaaaatcctatttttattccatctatttcttttatatcattactatcaaaaactttttttccattttcaaaaatatttgatgataaaaattttaaagtattctctcctaaattagcacttttagataactcaaacagtctatcttttccataattaaagtcatgatttccaggagtaatatagtcatatccagcacatttaattaattcaattgcacttttccctctatccatatttactattggaagtccatgcaaacaatctcctgcatctactaaaattgagtttggagtttcttttttcaatgtggctagatttcctatttgtatatggtcatcaccttcagcatatcttccatgtatatcattagtgtgaaaaatggttatttcttcaaatcgctctagcccataagaaataaaactctgacttgttgtaattagaattataattaccaaaattaaataccttctaatcttcaatataaattagcctcctcaaattagttttagctttaatataaaatttatattttacataaaactttttagataaatattaaactatagtaagattgattagtgtaatttttaatatttatctatcaatttaattttgtccatatccaattagttttaatctaattacattttttcacatctatatttttcttttattatataaaattattattttaaaatcttttcaactggtctcttttaaaagtccattgaggtattgtcaaatcaccttcaaaatctaaactataccaaggactcaaatttggatttttacgattaataagaagttgcgtttgttgtgcaggcatatagctttgggctatcataaatacctttttaccagtcttttcattttctgccatatccataattatacttgcatgtcctggacttccaccaactataaacacatctcctattttcatatcctcaacttttacaggctccaattctttttcaagagataacgttcctgaatatgcaaacactatatccataaactttctgaaactctcataagatgttgaatattcagttgctttataccagcttgaaccactatcttttactgaaattctatatccttgtgcccattttgaatacttcgccttaaaaccatcaacaaaatcaaaacttatttcatcatatagtttattctgatacaagtattctgctctcataagcataatcgcatctgcacattgatgcaaatctctattgccaatatcaacatcaaatacactatcataaataccttttgattccttaattcttccatcataatactttactttctctccataattttttagcttagtattcctaagaaatgattcaaaactacctttttctacatcaactcttttaaatccttttggtggctcatacctatctttcaatatatttgcatctttatgtactattataggctgttcatcttttttagaattttgaattttcttagaaccttcaaccacttttttatcttctccgttactacaaccaactaaggttaatgtaatcaatgacaaaatagtaattttctttaatactttcattaaattttcctcctttaaatactcctaaatataattttcacttttcgttctccaaatttttatacattgctatataaaaactttatttgataatatttcttgactcaaatacacatttattgttatatttaatgttaaaataattataataggatatcataataaaaacaaacaacagatttgtgttaattttagaaaggggaaaaaatgatagatttaactttacttggatgtggtggaaatgtacctatgccaaacagatttctatcctctgtatttataaactataaaggtagaaaaatactaattgactgtggtgaaggtactcaggtatctatgaagctaaaaaaatgtggctttaaagatatagacttgatttgtataacccatttacatggtgaccatatatttggacttttaggacttttatcaacaattgggaatagtggtcgtacaagtgatttaactatagttggtccagttggaatagtcgattgtatacgttctatgagaaatttagtagaatatgtaccatacactttaaaaattatagaaaaccctcaaggcaatttttctttagataataaagttttaagaaatttagaaatttcaacaatcagtttagaacactctatagagtgtttaggatacagttttaattttagaagaaaccctaaatttgatatagataaggcaactaaaaacgaagttcctaaaatattatggaacaaactccaagaaggtcaaaatatagttttaaattcaaaacaatacactccagatatggtcttaggagaattgagaaagggagttaagataagtcttacaaccgatacaagacctatagaatcaataccagatttcataaaagatagtgatttatttatatgtgaagccatgtatggtgatgatttagatatatcaaaagctgttagaaacaaacatatgacttttagagaagctgctaatcttgcaaaacttggaaatgtcaaacaacttttactgacccattttagtccttctttagacatacctagtatgtatttagaaaatgctactaatgtttttgaaaatactattcttggagaagatagattaagcttgcgtttaaattttgatgaataatttaatggaatccttatttctaaaaatttggaataaaaatttagggatgaattttaccatgataaaaatagtttaggtaaattcattcccttaattgcttgtcaactatattagctataatctaaatattatttagacacatttccagctacatttaaaacatcccatgttcttgcaaatggtggggcataacataaatctaacattccaagttgacttgtggtcatttttccaaagatagcagctgccaatacatttgctctttggacagcatccttaaacccagccacttgtccgcctaaaataacttttgtatctgcatcataaataagttttacatatattttatttcttcctggataataatgagtttgattataatcagaaataaatttagatttgacatttatgcctaaatctttagcttgcttttctgtaattccagttgatgctgcctccatatccataatttttatacaacttgaagatagtgaaccttgataagatacttctcttcctgctaggttttctcctactatcctacctaatttattagctccagtagctaaaggaacatatacattttcattacttactatattctttatagttgcacaatctccagcagagtatatatcttctacagaagttcttccatattcatcaactactatagctccattttttagcatttttatattagtatttgacaaaaactcggtattaggtctcacaccagtagcaattattactacatctgtatctatttcccctttgtttgttataactttttctactttatcttctccacaaagttctacaaccatttcatccaagtgcaaattaacattatgtctatttatttcttcttctaatacatccgtcatctccttatcaaatacttgtggcaatattctatcttctaactgaattacatctacatctttacctaatttcttacatgcctcaactgcttctaaccctataaaaccagctcctattattgtcactcttttattatcttcattacttaaaagtttttttagatattctccatcatataaactttttaatgtagaaacattcttcaattttatgttttttataggaggcataatacttcttgctccagttgctatcatcaatttatcatagtaatcttcatatatttcatctgtttttatattttttacttttattttcttagattcactatcaacctcaacgacttctctaaatatatttaaatcaattccagcttctctaagtttctctggtgttcttgctaataattcatcagcatcatcaaaaaaaccaccaacaaagtatggtaatccacaagcaccaaaagatactatttcagttttttcataaacaacaacttcatactcaggttttattctttttaattttgctgcagcactcataccagctgcaacaccaccaattattactactctcattttatctctcctttgatgtctagttaatttcttcacttattttaagcttttcatttgatatatattctatgtaaacatttttcataacaatttttagttatttatttaacatattttaatttgaaatcaaatattataaaagctattttttattttcttaccacaattcaaattctttaaacatttattataccctatttttctatacttaatcacatttttcaaaatcaatttattttactctatttaagtaaattgtgatataatattgacatttttttaatatattggtatcatttaaacttagaaaaatttatttttaaataaaaggagaaaaaatattggaaagttcatttttatcacaatttcttatgattacagattttaaaacgatttttttcataatattacttctaggtacattctttattgttagacaatttgaaaagaaaaaaataaaattttcattgagaacaatatatgctacagtactaggactcatattgggaatcataatacaagcttttgctggttttcctaatgataccactcaagtcacttggctacaagaagtaagcaagtggtatagcctatttggttctggatttatggacttattaaaaatgttagtagtacctttagttttcttatccattataaaagtaattataaatatgaaagataacaatcttggaactctgacatttaaatctttaggtatgcttcttgctactactgctatagctgcaattgttggaattatcgttgcaaatataatgaagttaggtgtaggagctaatatgcctactttagttgaaaatcaagaacttaaagaaataaactctcttgtggatactttaagaggattactaccatctaatcctgtaatggctatggcaaatggaaatattgtagctacaataatatttgctacatttatagctacctcaataaagagattaagtaaaaaacactttgaaacaataaaaccatttatagattttatagaagcatcttacaaaataattgtaagtgtgtctatgactgttattaaatttatgccttatgctgtggttgctctgcttgcaaatacaataacttcacaaggtattagctcaatagtatctgttttacagtttatattagctctttatatatcagtggcaatattatttaccatacatttaatttttataactttaaatggtctaaatcccattacttatataagaaattcaactgaagctttacttctggcatttacttcacgttctagtttaggaacattgcctgtaacgatagaaagtctagtacaaaatcacggagttgatgagggtgtatcaagctttacagcaagtttaggtgcaaatatgggtatgaatggttgtgcaggtatatatcctgctttaatggctgtaacacttgccaatatggctggagtaaacatggatatgagcctttatgttatgttgttaattgttataacaattagttcgtttggaatagctggtcttccaggaactgctacaatggccgtttcagttgttatctctggagttggtcttggttcttattttccattagttggtggtatacttgcaatagaccctatactagatatgggacgtaccatgataaatgttaatggtgctatggtatcatcaattactgtaggaaaatcacttggaaaaatagataaagaagtatttggtaaaaaaaacatttcttagagtaacacttaagataaatggctaacttttaactagttagccatttattttttattttataagaaaatttctttagaaatttacttacaaaacggaaaaaattcttttgtaagattttggggatatacagatataaaaacaaagtcatagtcatgggattttgcatattctagtatatctccatcataatatctagggtctatcatatctatagatgaacaaacagaggaaaaaaatgctgctgttggtacaattagagaatctttaacaaacagcacttttaatccatctggattttctatattttttattttaactaatggtctattccccaataaatatgtaaaatacttatctgattgaccatccattaaatcaaggtctgcattaaaaggatatgataatattaaactctcttcaaaccttccttttaattcaaatttttgagatttagaatctgtataataagtataattagtcttaaatttaggataaattaatgtaaaatcatctataccaccatataagataccagtctttcttcccatagaaccaagaaatgacttaggatatacaattgagttataattttctttatctctatagtaatgattttcatctaaattcatattgtattttttattaagttgctcaactaattctccaaatgcccaaaaagaagtttctactttccagtgatggtctgttttaaaaaataaatcatcttttggaataccactctttaaaatattttctctaaaatcaatatagtccacattatacttttttagttgatttaaaaaattatctgctgtctcattgctataagaataaggtattccttttggaaattttgtcactccttttatatacttatctggagtcattaagtaaactaatttagtgttttgcttttccatttcctcagaaaattttcttaccctatctgctatcacaccaactggatttggagctttagcaaaatatgtataatgcatctttccagaagtatcttttacaacactaaattttgaaaactcatttttacccattaacttttgtaagtagccataagtttcaatgaacgtatttttatatattactttgtcatttactgtgttatcaatagatgatattgtatcttttaaactacttttttcagcaactgaattttttatctcctgtatcatatcttttccagaataacaaatattaaagatagagaaagcgaataaaataattaagaacataattgcagttattaatcttactttaaaaaatctattcatacttttcctcccaactaaaaattaaaataaataaatggattatagcttccagttactaaatatgtcacagaaataaagaacaataaaatagctgagattggataaaatacgttaaatatcatactatatttagcttgttcaacaacaaacttattgattttctttgcaataggtacactaaaaataaatgcaaatataaagaaaacccagtattcttttaaaaacatatatgtataatcactccatataactccattgcctccaagcatagctttgaaataattatatgcttcttttaaattaggtgacctaaacaatacccacccaaagttaactactaataacgcataaatatgttttataaaattgtgattttcaatcttttcaaacattataaatcgctctataatcaagaaaacaaagtttaaaatcccccaaattacaaatgtccattctgctccatgccatattccagtaaataaccacactataaacatatttctaatcataatatctttatttgctactctagaacctccaagcggaaagtatatatagctcttaaaccacattcccaaagaaatgtgccatcttctccaaaactcactaattgattttgatatatatggataattaaagttctcttcaaatttaaaaccaaacataagacctaaacctatagccatatctgaataagcagaaaaatcaaagaatatttgcatagtataggctattgaaccaagccatgcaagtgatgcagctatttctccttgactattcatagtgtaaatatagtctgctactatagccatgttatttgaaattaatacttttttgcctagacctgttataaacctgcaagtcccaatagaaaatttattccaagtttcttttctattgagaatttgttctgccacactctcatatctaactataggacctgctattaattgtgggaaaaatgctatatacagtcccacataaaaaggattcttttggacttctccatgtctacgatatacatctataacataagacattccctgaaatgtaaaaaatgaaattcctataggtaaaacaatactaggtatagttagttcagtattaataagttcactaatatttcttagcgcaaaagctagatatttaaatataaataaaacacctatattatatacacacatcaaaactaaaaaaacttttacttttattttactttccctatatctatctactagtaaaccaaatatatagttcattattatggaaactatcatgataacaacaaattttggctctccccaagcataaaaaaataaactaacagcaagcaatatcatgttctgtatcgttcggttaaacctaaatacataatataaaaccaaagttataggtaaaaaataaaataaaaaaattaaacttgaaaataacacaatctaacctcctctctttacttagtttttgaacattttttccaatataaatatattccaaagcatattattactagagatacaaataaaattcgaacaaacgttatgatgttattcataaagtttatttttttcatatattgtactgttggtgattgctcaggagataccaatgtatatggaacaccatccttatcttttttattaatactccaagattcagttaatgctattttccttccaattttaaacttatcatcaacattaacttgtaaaataatttgtccaggttcggctttattacttaatgttaatttaccattttgagatatgctcacattatcttgttttcccataagagaatacttaattttagaatcacgtttaagacctaatacctcatactgacttatactttgacccaatactggtatttgtacttcttcattgccagttattttaatattatgtaaaaaacttaatttctcttcagacaataaagatatcttttttataataacaatattatgttcttcatcagatggaataaatgtaattccccaactaacaatgtttgaaagcatacttgagtccagcacaacattacttttctcatttataaggctattaaagttcacataaattttgccttcaaattcacctggtacttctatgcatccttcttttattttatctgaatatattatatttttatcttccaaaaatatttcactaccttcttttaacctaaattcaagcatattcttactttgtatacttaaatttattttctgggaacttttatttttattttgaatttcaatataaaaattattatacatactccaattttcttttatattttggtaaatatataaataacgttccttatcacttttagaactatctgtttctatttttacacctgtatcttcatatgtaatcctagaacttaaatcagtctctatctttttaaaggataaatctaaaattttatcacttgtcgctgaacttataaaagtagtatttataaaaaaaataaacaccaaaataagatattttgcagaacaaaaaaacacttttaaagtcttcatttcatctctcctaaatatattccatgggttcaaactcatctatacttttttccttcttttcactaggatttgaaacaggaattgtcttattttgtaatatccaatccatcatttcatctcttaaaaagaaattttgcattatgctgtcaatgttatttactttatataagagacctctttcatcgattttaccctcacataaatcacattctaacacaatattttcattaatttccaatgctatttctttaggataaatatttttattctcaaaatttaataatacatattgataattaaaatttactattcttaatttacctgtattttttatatccatctgaaaattcatattgattcttggacttcttcgtgataatgttctaatcttttcaatacgtttttttacattaatttgcaaatcatcaaagaaacctagttgattagatattgtcatcggtaaagtaggtattctatcgtgaacaatacacatccaattatctatttcactatcttcaatatgtgtaatataagctgcatatttccactttgaatttacttccacaacattaacaatctttgctttcatattagctatatacatttcatttcctgatttttctctaaactctacctcgaactcttcttctggggaaatatattctggattttctagcaaaaatgcaaacccattttctgatatatcaatcgtttttgaagaaagaacataagagttttgctttaacttaaaatcaatttcagcaatataacgctcagactttcttaactgttgtctccctgatataaataatgtagccataacaaggttaaaaaggtttccaatcaaccaaaataatacaactgaatatgtcattgaactcattttaaatattgctacaaacatttttaaaattcctatgatagataagaccatgtaaataaaataaggtattccctgtaaaaacttatacattctattttcttctaatttattcttatttgttactgaaaatttatttttagatattgcaaacgtttcaagtattactgctggcattaaagactgaaacattatagtttcatatatattggtccatctagtatttcttatattttgagaaaatattttaagagataaactacttaaaatatacattggcaaccaaaataccaatacttgaagtaatgtacattttactacaatcacattaaacacagaaaataaaataggtgccattatatatacaaagcgttttatacttgcataccaataagtaattgaagaaatataacttattttctgccaaaaacctaaacctctcctaaacaaaatatttagacgtctaccagtttgtatacatccacgtgcccatctttcacgttgcttaataagactttttaaatctgtaggagataaacctgatgcatgtacttctggaatagcataacatctataccccttactttgaattaagatacctgttgcaaaatcttctgtaatagaataagtataaaatccatcaacttcttcaagtgcttcccttgaaataactgtattactaccaccataaattacagaatttgtcctatttctagccaattgaatatctctgtaaaaataatcttgctcatttggaatccttccctcagagtgcagattaaattggaacaagtctggattataaaaactctgtggagtttgcacaaaaccaaccttttcatactcctctttttctccatcttttttagcttgctcatttttcaaaaagtatggtactgtagcaattaaaaagtcatgcattggtatcatatctgcatcaaacgtagcaatcaaaggagagtttgtatgttgcattgcattatttaaattcccagcttttgctccttctctttcagttctagttatgtaatttacacccattttttctgctagaatacgcatttcttcacgatttccatcatcacatatgtatatatgtacctttttcttatctggatactgcatatgaatacatccatttacagtttttctcaccaaatcaacagactcattatatgttgcaatgaatacatctacatgtggataaagttcttcacttatgactggtttttcaggatactcaatatttgacataccataataatgtacaaacatttccatcatacccattatctctacaaaaagaagtattatagcacagattaaggcaaacatcccttcttctttaggtactgtgtaaaaaattctccacaatatatatacgatattagtaataatagttaaagttataagtatcttttttgaatttttcttcataaaatcacctcttttctattaatgcacttaatatgtctctatcccaagtcccttcaatttgattgtatataccaaatccagaagcaagctcccaataagcccatgaaaagtttcgtttttcagcttcttctcttacagcttttatccaagctcttcttgaagcttctggtgcttcttttgttactccaaattcacccaagaatatttttaccttatttttatttgcccaattttctacaatatcaaaccttttttttaaataatccatttgttcatttgttccttcccaagtaatattgctcaagtgctcaaatccattatgataaatgtttccttgaaatgcaaaatcatttggttcgtaatagtgaaaagaaactactatattagaatcttttggaacatttaattcattcaaataatcaatttgatagaaattatatggtcccactataatagttcttttagggttagtttttctaattatctttattgcttcttcaatgtattcgtttagtaattgtgaagataaattttctttaggttcatttaataattcaaataccaattttttatcatatttttgatacctattagctatctgttgccatatttttaaaaactcttctttatgaactcttggttctttcataatttcttcaaaatgatgtaaatccaacacaactattaagtctttatccaatgcataatctacatatttatcaatctttttaaaaaattcttcatcaattttaaaattatcagaatctgacgtataatcagaaaaccttactggtatacgtactgtgtcaaaacctgcatcttttatatcatcaaaaaacttatttgacatttttacatcccacggaaaatccttaggtgattctagtgcattacctatatttatccctcgttgcatcttaactgtatcactgttacctcttattgcaagataaaatccaataaaagctatacttaaaaaaaacattataataatacctattctttttatattaatccccccaaacaatgttatcttccatataatattattcaatccctattatagcaaattaaagtacatcatgttacatataattattgtcatttataaactttatagcgtttatagttagttttaaaacattgaatacaactaaaaaactaaagggctatcttagaatataagtaatcctatttttcattgttgaaacaatgaaactatattgatttcatacaaaaagagtgcctcatgaactaaaaagttcattttgagacactcttatatttttttatactctgtctaacaactctaatacatattttttaactttatcatatccccaattatcaagtgaatatcctaattctatgtcaccaaaacctttaatttcagcattttcttttttatttaataattcttgcataagctcaacttctatatactctctgcccttttctttttctaacattgtaaataactcaaagtcctgtattccaaatcttaaattctccattctgacacttctaactggctttaaatcttttccaggataaacaaagaacatatctccagctttccaaatagggaatttgtaacttgaatctttccaagggtcttctgtccataaattatagtcccatcttaaaaatccatcaagaccaaagtaataagtataccatcctattattctattttctacaaaaggagaacttaaaaaactatttggtttctctggaaaacagcatacaaaccaagtcaatatcccacccttgtcattgatttttttcttaagattttctatatctttataattttgtatagtaagttttaaatttattgacatatcatcaatttcatctttagctctatctaaaaagttttggtcgtgagttgctgatttatatttaacttgatgagtacctacagtagaatttataaattctatacactctttgactacttctggattatttggttcatcagctataatccttactctatcccataatccacactctattaaatgatttaatactaatcctatatattcttttaaatcatttgtattgtttataaatttaaatactttatcattttcatcaaaatatcttactcttatagggtccttataaccttctacaggatttccaaactcaccagcacaccaattacctaatagaccaaataaatctatctccttagacattttatacttatcagctatgcttatatacctatccatactctcaaagttacatttaatctttccatccaatccttttgatacacttaccatgttatattcatataggtttgatggatttttataaactttataacaactttgccctgcccatggataatctgaaactataactgttgcaactttttctcctaaagatgctaattcttttaaatagttatcgactatttcaaaatgtatatcagaccataactcaactttatacattctagctaaacaacttggatgttgccataaatctaaaaagaacttgcttttatctaaaggctttagcacgacatttcttacttttacaggaacatcaattgtacaaactttttcttcatcttcatatccaaagcttttaaatatatcaatacctatattaaggttattttcttcaaaatcttctggtacttgaccttcaatccaaaatgtttgaggcaaatattgctctactaacacatctttatcccttaaaatagcatcattcacaaatgcctttgtatcatcttgaacatatcctaatatatttatactaaaattattttctaaactattaggcacatttaatgctaatcttactctattttccagtcctttccatgatatagtactgcttttatcaattgtacaattaaattcttctgttgcttttagcataatttgaaatgcaaatttttcacctttagctactacaatatccaaatccttctctttccaagtttcagcttctataactgagtatttattgtgtttgaatgtgcaatctttcagtacatatgaaatttccatagtttaaattcctccatatttatataagtttcttttatgttattaaattagactatttaaccttttataccagacaaagacacaccttcaacaaatttactttgtaaaatcaaatagaaaataaatggaggtaaaaatgttattgtagcccctgccatcatctgtccataattagttatctggaatgtcttaagagtagataatccaactgttaatgttctcattgcatctttagttgtagctataagaggccacataaactcgttccatgctcccataaaagtaaatattgctagtgtaattaatgctggtttgattaaaggcaatactatttgtattaaaattctaaaatccgagcaaccatctatctttgctgattctaataactcttttggtactcctaaaatagcttgtctcattataaatacgccaaatgcagttggtattggcataataagtgcaagataactatttatccatcctaagtgtttcattattatatatagtggtatcattgtaacttgggaaggtataattaaagtcattatcataaataaaaataacttatcactacctttaaaatccatcttcgcaaaagaatatcctgctaatgtactaaatactaaatttaataatacacctgaaaaagatactattgctgtattaaaaaaatattgtgcaaatccttttttagtaaagatatctatatagttttgaagagttactgttgaaaaagatatatccaaactatatgagttatatgttatcttcaatgatattatcaacatgtatataaaaggtaccaaacttgcacacgctataaataaaagtaaaccatcacttaataatcttcttgctgttttcatattatacctacctttctaaaaatctgaattgtctcgttttacaagcttattttgtaaaatcgaaactactgctattaacaaaaataatacgtttgctacagtcattgcatatccagaattaaagtttttaaagtttaagttaaatgcatgcataactatactcatagtagatatacctggacctccacctgtcacagtataaattaagtcaaatacttgtaatgaccatatcgaccctaaaaatacaaccattattgtagttggtttcaataaaggtacagttatttttataaattcttgaagttttgtagccccatcaaccttcgctacttcatagcagtgttttggtaaattcattatagctgaaatataaattaccatgaaataccctatatttttccacatagatataaacataagtgtaggtaatgctgtcttactatctcctaaaagtttagatgattctattccaaaggcacctaatacctgatatataatagaaccttctccattcaataaagccctccataccatacctatcaaaaccatagatgataatactggtataaatatagcacctttagcaaatgaagctattttactatttccttttcctgtaatccaaactgccaaaatcaatgataatatagtttggcaaggtactacaacaacagtaaatttaatagtatttataatagatacttttaatgtttcatctgtaaataattttttataattttctaaacctataaaagtggctggactaataatattatactttgtaaaactaaagtatattgacattattattggtatcacataaaacgccactaaaattattcccaatggcaatatatacatatatggtttaatatttaattttgttttttttctttttgaattttcttcaaactctctaactaagttttccattttatcctctccaatataaatattagcattgtatttataaatacaatgctaattttaatctgtaaagtcctttacaacatattacagctttaaacttttattgtgctaataaatcatttgaatattttgcagcatcatctaatgcttgttttggagttttatctcctgaaatcatagtttgaagttctttccataaatattcatatatttcaactccatgaggtcctactactaatggtctatatacatttttgtcattttccaccatttctttgaatctttcatcaccttgatatggttcaccttttgttattggtgctcttggtattgctttatgaaattctgtcattgattcaacacttaacatatgttgtattaacttgtatgcaagttctttatttttagcagatgacattaaagataaatggtctactgctccaaaagttgctgctttcttatcttctagtccagttacaaacccccaatttaaatccgggaatgattcatcaaatacacttgttgcagcagaagataacattattgtaaatgctgctttccctggtccaaatacgctttctatcatttcattactatctttagataaagaatcttcaggcacatatgcttgtaattcttttaagaaattagctgcttctaaaccactcttatcattaaatttaaccgattttaaatcatcattaaaaatatctccaccagcttgccataaataaggataccagttccagtttaagttaccaaaagttttagctccccatccctgagctaatccccattggtctatctttccatcaccatcagtatcttgtgttgcttttttacaaattcttttaaaatcttcccatgtcttaggaggtttctctcctaatttctctaaaatatccttgttatagtataatacccctggatttgctgcttggaatggcataccatacattccacccatcatttcagatgtttttatataaatagattgctctttatcctctttagttgcatagttagtcaaatcttctactgctccactttctataaactgtggatacatttctgcatacatatatcctacatctggaccttcgccagcacttatagctgttgcaaatttttcagaataattatcccaaggaattatctgtaaatctacttcacagttatttttttcctcaaatttatctaaaatagggtcccaaacttccttcatattattttctactggtggcatccaaagaactagtttttctttttcgccatccttttttgaatcttttccatttccacttgaacaccctgttataagtgttgtagtcataattgctaccatagctagtgaacataatttttttaacatacccacttttattccctccattttattttcttttttcatttttattttcttttttcattataattctacacattttcactccatttaaaatattatcaaagcatgtatttattgtctaatcagttttttctatgtacttttttttaatatagtttttttctatgacaacgtttctaatatttataattgataccttccaatttattttctccaatttaaaatttaattacgcatctttttaatctacaataataaaaagctgtagatttttacctacagcttttaaatgatagcatttattatatattattaatattctttgttgataaacttcaaagttcattaacatatttttttaaccttaatattcataatgaattacacttttatattcatcaaaaatcttcttatttaactcatctccaccatcaatattggcactatagaaaatcggaggattctttagccctttattaactaattcctgagtagcttgagctataatagagttcatcacagtagttgctattacagtagaagttggactaactttttggtttaatccatctatctctacacaggcatctcccttttgaccatgattatctatcactaaatcgcatacttcataaagtttttttcctgaagaatgtcttgaagatacactttttgagtaacttaaattagttatacatattactattgccttattttccttagctttcatagcaaactctatacttactggatttctaccagatactgaatgaactataactacatctccttttttaattggagttttatcagctagagctgtaccatatccttctaatctttccatcttacttgtgtgagttataggcgctgtatctaacattagagattttgcaaatactggatttataagaacacagccacctgctctatagaataattcttctgttaatattcctgcatgtgaagctccaaatgaaaatatagcatttttactttctattgcttcaacaaggatttgtactgctttttccatattgactttttcttcgttttctattatatcaattaatcttcttatctcatctatgtatttaaatttcatatctataatattcctccaaatagtgaacctataaacttactaattataccaaataatgaaaggtcgttacctccaaatattagtatccaattttgaatagttcctgagtaaattacagcagatattcctactaaaactaccataaatattgcagctatagctgtacctattatagctccacgtataccaccttgtgattctcctattactgctgctgctccacactcaaagaatgaagttataacaagtggtataagtagcaaattaaatacattaaagtagttacatattaaaatcatagctgtagatgttagcatagcaactaagaatcctattaatacagcatttggtttataattaaataatattggacagtcaaaagcaggtagtgcatttggcacaactttttcagatataccttgaaatgctggcattatttgatttattagcattcttaccccatgaagcattattataagacctgctccaaaagaaagaccttgctttattgcatacgttccaataaactcattactatctttaaacgcacctggtattactatcccaacaactataaacattaaaaacactgccattccaccacttatagatatttctctaaaaaatgataaactttgaggtatgtttatatcttctgtagatttttctttatttcctactaatttagcaacaaatcctgatataagtgctaaacaaccagatggatgacctaatgtaaaagaatcatctcctataacatcaaacacatattttcttaataaccaaggcattattgaccaatagagtgctgataatactgctgcaaaagctattaatactccaccatttaatccagcttcaactcctgaagctacaaatatgaatgggaaccaataaagcatgtgacctgttaagaagattgtcttaataggagtaaatcttgctatcattaggtgaatagctaaacccgcaaacattgctaaacctataattccaccataacttgcagtaaaagtaacatcacttaaaccttttgttactgcaccaccacttatactttggaaagctccattaattggtgctattgaactaactaacatacctgttccagtctccataattataattccgaaagctgcaagtagtgacccctttataacatcagatgctttctttttctgtagtacaagaccaaatgctgctattaatccaattaacatagatggattacgtaaaatattatttgaaataaaatcaagcattatattttttagtgataggtcaactgtttaagttttctaccactaaatccctcctctctttcttactatttttgaatttagtaagtttttattttattctgattaacttaaatttactttttaaaacttatactatttcttatcatttttatcacttaaaaaagtttgaacaacttctgtgacttctgctaaatccatgtactttttaactggatatacatctacattacaagttccttttaattcatttaacaattcttgacttgtgaatatacagtcacaatcagcacctctagctgaatttatatctgtattttctacttcacattctatacctaactgctttagagccttttgtattgtcatttttaataccattgatgaacctacaccaaaaccacatactgctaatatcttcatttttcattcctcctaattttgcttatttataagttctagtattgaacttttatcaccattaattattagttttacattttcttcctcgtacatcatctctgatagtgatgctaatgctctaatgtgagtagtgttatctacagcagctaataccataaatatatttactggttttcctaataaatcaacttcatcttctactattagtaaagacatagcaagcttgtttactccttctttagaacttgcatgtggtagagcaaatctatcagctaaaacaatatatggtccatatttttcaactgactttatcatattttctatatataactcttctatagagttatcttctaacaatggctttgaggctatttttattgcttctttccaatctctaacactttttattatattgaccctttctgcattaattaattcctttaacattggttgatacatctctccttcatctatcttgtgtattatgtttaataaatcagcttttagtgcttcttcattattgataactccattttttcttatagcttgtattattaattcaagattgaaatacttctcgttttcttttacacttattagtttgttcataagtaattgaacatctgatgatgttaaaagaggatttacaacaattacattgtttacattttgtatatctatagttgtaattatgtaatcgtagtatacatttacttcttttagttgcttaatggacactatacctactatttctatggttggtatgtatttatatagttgtatttccaaactctttgataccataagaccattaggacaaactagtaagactttatttcttcttaggccattatccctagaccctcttaaataccctccaaaatacgctgctataaatcctatctcttcttctcttatcccctcaaatacaggaaactcttcttcattttctataattgattttataattttataaagtgactcatgtttatacttagtctcatctaacattggatttctaataggaaacttaaatcgtattctgttgtaagaagagtggaggtgccttaaaatatttttcttaaactcatgcttactttctaattttattgctgtatttacttcaaacttatctataagtttatctacatattcttcaacaacatcttccttaacttcactatttaagctaggaagtgaacttatgtaagtgcatatataggcttgttcattttcattggcttcttcacataaaagttctttacaattactaaagtaactaatttttttagcttcatttagatatttatatgagtataatgttttcccatctcttatccttttatttagaaattccacaaacttagttagatttaataaagaataatcagtaagttttatatgtccttttgtatcgaaactacttacttccttacttatagaattaatttccagtacattttcttgaacaattatcagaaacagctctctaataacgtattcatcacctataattttgtactttcccttatactctaatcttaaccccattgtttgaaggtatttttttacatcagttattgtttgtactactgtgttttttgaaagtaacatttcatttgttagtttttctattgatattttttcgccaagtaatatcttgtttaatataaaagtttttctgtaatcactatctaaaaatttatcttcttcagttgaaattattttccttgcatcacataaattaccttcaaatataaatttgtgttttacattttttatattaccactttttcctagttgttcatttatagctagaatatcgtaataaatagttctctttgaaacattaaacctttcttgtagttcttgtgatgttacattgttatttttaataataaaatctaatatttttttagccctttccttcatactacctccttaattttattatctatattttctacatgtagtgccataccaaataattgcacatgatttagtattattttataattttgcacagtctaaccctaatctaaaagaagacagtggtaaaattattaaaaaaatttgaaaataacctatattatttatacaaataaataagttgatttcaacaaataaaagattaaactacattataatatcaaaataagatataagtaatctaaaaagcacaattatataacaaaaaattgctatattaaaagagagctatcacacatcaattggaattttttgtgtgatagctccatttttatttatttaaaatttattttttaggtctaagttcagctttatctctttttacttcttctaatatttctcttaaattatactcaacactagaaagcacatcctctgcatattcaattgacccaattcttatctcattggctattctctcagctctatcaactatatcttttgctctttggtctgcttgaacaacaggttcgctggattctacatatgcctttactacatcttcagaatttttctttaattcctctatattatcttgatattcttgttgtattctctcagcttcttttttcgcttgttcaactatatttgtagcatcttgcttagcttgacttattattttatttctttctttattaatccatactgcctgtgttacttcttctggtattaaagttcttatatcattaattattgctaaaacctcatctttatccactgtgcatttatgtgagaaagggattgtagaagcacttctaaatatctcctctaactgctcaaatagttcaatcatttctaaatctatcttcatatatcaattacccccactagtttttttctttaattcttccaaaacaatctttggaaccaaattttttatatcagcatcaaagagcaaaacctcttttattaaagatgaacttataaatgaatattttgtacaacttggtaaaattatagtctctatatctggattaagctctctattcatatgtgccatctgaagttcataatcaacatcagcaccacttctcacacctctaactaatgctccaatcccattttcctgacagtaatttattaataaaccatcaaaagtcacaacttttatattatttaaatggcttgtacttttttctataagttttactctttcatcaaagctaaatagaccctttttattaggattatttaatactcctatttgtaattcgtcaaataacttcgaagccctgcaaataatatctaaatgtccattagtaattgggtcaaaacttcctgcaaatatagcttttctaggtttattttccatattatgcctccatcttataaaaagttaatgtagtatttccatatttcttatctctagttttctccaatttacatatcttatctggaaataaatcattcgtatcatgttctacaactattattccatcttcgttcaatagattagaattatcaattttttcaatagcttctataaacatatttttataatacggagggtccataaaaattatgtcaaatttactattttgtaatttaagtttatctattgcagtcttaaaatcaaggtttaaaataatactttcactttcaactcttgccttttttacattggacttaacaatatctatgctttccttactgatatctacaaaagtacatgacttggcacccctagataagcactctattcctaaagaaccagtcccagcaaataaatccagaacttcactttccattatatatgaatttatcatattaaatagagactcttttactctatctgtagttggccttacatcttcattttttggagtatttagttttaatcctctcgcttttcctgaaattactctcaatatgacaatctcccttcagcacattattacattagtaatattttaacataatttaaaattaatttaatgaaatttctttcaatgtatctttaaatttatctataatttcttttttgagtgccatgttttctttcaattgtagattattatcttcacccaatatatatcgagcttcttgttgtgctaacttcaatatttttatatgtttaaataagtttgctactttaagttctggaagaccatgttgccttgtcccaaaaaattctccaggtcctcttatttctaaatccttctctgaaatcttaaaaccatcattggtctcttccattatagccattctttgtctacatacatctgttttagaatcataaattagtacacaatacgatttatgactacctcttccaactcgccctctaagctgatgtaattgtgcaagtccaaatctttctgcattttctattatcattaatgttgcatttgggacattgacaccaacttctataactgttgttgaaactaaaatatctatttctttatttttaaaacgttccattacttcgtctttttcactcgatttcattttaccatgaagcaatccaagccttaaatcgtggaaatattcagctcttaattcctctacaagttcaactgctgatttagcttctatagcttcactttcttctaccaaaggacatacaatgtacacttgtcttcctgattcaacctctcttcttacaaggttattatatgctctatctcgcttacttttttcaatagcaattgtttctattggctgtcttcctggaggaagttcatctataatagaaatatctaaatctccatagagtataagtgctaaagttcttggtattggtgttgctgtcattactaatatatcaggatttgctcctttcaatgaaagtttgctcctttgcataacaccaaatctatgctgttcatctgttataactaaaccaatattattaaattcaaccttatcttcaattagtgcatgtgtacctattaatatatcaatctcattattccttatttgttccaatactgtatccttttgtttttttgtaagactacctattaatagacctacatttattccaaaatcttttagagactcagtaagtgaaatgtaatgttgccctgctaatatctctgtaggtgccatcaaagcgccctgataaccatttaaaacacaatttgcaagtgctaagagagctactactgttttaccactccctacatcaccttgtaccaatctattcattattttctctaaattcatatcttgtataatttcatctaatgccctgttttgagctttagtcagtttaaatggtaaagcacttattattttttttaagtctttacttgtttcaaactttattccatcttctttatttctgccacttttaaatacaaacaaccctagttgtagtataagtaattcttcaaatacaattctatataaagctatttttaatgattccttactacttggtgaatgtatgtttctaactgcaaaatctatactacatagcctatatttttctataattctttgtggcatatattcttgtataattaattctttatcttcaagtactgttctaattatactcataatttctttatttgtaacaccgtatgtaagctggtacacaggcataaatctacatgtattcttaggtgaattagtaagatattctaattcacatgatgtaagttctaagttattaaattttttcttaaccttcccaaaaactaatattgaatctcctggacgaaaagtattttttatataacttttattaaaaaacactaatttagccgagcctgtctcatcttttacatcaatctttgttaaagtcataccttcttttgggctaaatgtatttatacttgatattactgcttttatcgtaactttctcaccatcttctaattgtgctattttctttagattatttctatcttcaaattgtcttggaaaataatacaataggtcttttagtgtaaatatacccagtttatttaatttatctgcttttttaggtcctattcccttaacatattgaacatctttatataaatccaacaaatatatcacctactacacaaaaatcctgtacaaccaattttataaaagctacttggtcatacaggttcttataatcattattcaactgaaattaagtaataataaagaggttgtcctccataatataactctacatctacatcttcaaacttttcttctaaagaagtacgtagttcatttgcttgagattctgtaacatcttcaccaaagaataatgttattatagcagtatcttcatcaaccaacttttcaataaggtttgatgttacttcatccacataatctcctgctgataataaatttccttctgcaattccaattatattaccttctttaacatcaatttcattcatcactgtatccctaacagcaaaagttacttgacctgatttaactgagtttaaagcattcatcatagcttctttattttcatcttcgcttaattctccattaaaagttactaatgcagcaaatccttgaggcgtattttttgtaggtataactattatatttttatcactcaattcttttgcctgattagcagccattattatattgctgttatttgggaaaataaatatatttttagcatttatatgctttatagcattcataaaatcttcagtacttggattcatagtttgaccaccttctattatatggtcaactccgaaatctttaaatatatttgccaaaccttcacccatagaagtagctataaacccaaactctttctcttcttctaaaggttcactatcattttctttcttttcttctacatccagtaatgtattttcatgttgtaacttcatattttctatttttatagttaataattgaccgtactttagagcttcttgaagtacatttcctgggtcattagtgtgtacatgtacctttatgactccatcatctccaactactgctagactatcaccataagccatcattatgtctcttattttagtatcttctaccttagaactttctaaaataaattctgtacaatagcaatattttatatcatctgtgctagtagtactctttgcaaaatccatacttgttgaaatattagtatctaggtcaacattttttatttctatgttatcgccttttatagaagctaacattccttcatatataagtacaagaccctttccaccagagtcaactacaccagcttcttttagattctttagaaggtctggagttctttctaatgaagaatttgattccttcacaagcatacttaaaaactttactacatctttctcttttttcgcagtttttattgcaaactctccactttctctaactacagtaagtatagttccttcaattggttttattacagctttatatgctgtgtctgaaccatttttaaaagcttttgctaaatcttctgttgataatttactttttccttctatagatttagctatacctctgattatttgtgaaagtataactcctgagtttcctctagctcccattaaagaacctttagataatgcttttccgatatctgatatattatcattttcaacttttgctaattcttttaaggcataagatattgttaatgacatattagttcctgtatctccatctggtacagggaatacatttaacttgtcaactaactctttattgttttggagattgtttgcacctgaaataaacatctcccttaaccttttaccatctatatattgaatcatttgtttcctcctatgaaattacttaactcttattccttgtacattaatatcaattctagtaactcttacgccagtcattttttcaactacatactttactctatctattatattattggcaacagtagatatatttgtaccatattgtattataacataaagttcgattgctatggcatcttcttctacttcctcaactcttacacctttagttgcgttctcgccttttaatagctctactattcctttagacttatatgctaaacctactaagccataactttccattgcagctctatatacgacttgagctattacttgattatctatttctatatttccatattgattcgttacctttgcactcatggttgacccccttaagcttatttttattaaaaacatttcttaatttattttttactatttttacttatttattatataaaattataatcatatcatactataaatatggtataatttaaacctagaaaagtttttggataaaatttcttctatagtatatatattcaaagaaaaataataattattttccaaatatatttactttatataaaattatatatataattttatatgataataagaaattcttcaatatgtgtaaggcaaatatatatttctattgcaaatttttgttatttatgataatataaatatgtttttagtctttaaatagttatcattttaaggaggtgtgcgtagatggcaaaagtatgtagcgtatgtgataaaggtaaggtttctggaaaccaagtatcacactcaaataaacataataaaagaacatggtcagctaacttaagaagcgtaagagcgattatagatggagctcctaagagagtaaaagtttgtactagatgtttacgttctggtaaaattgaaagagcttagtaaccacgtttaaaagcctacttccgtaagtaggctttttaatttaatcatttttactctttctcataaattttaggattatacttgaaatccattttggtaattttattgttactactttcatcaatactcaccccacactttatagttaaaactattttaacaaaaaaataataatgctccacatccaataagtattaatgcggtaagtgctgaccaaatccagccaggaagcaacattgacagaattacagccattcctgttgctagacaaagtattcctagcaataccttagacttgttatttctcatggaacacctccacatagaacctgtatctataaatattttcatattcaagtttatgcgacagttttccattttagaccaataaacacattatgtaattttaatttttcatactagaattattactgaactccgatatagattctacaatatccaaaattcctttttttctacttaacctttcaggtccactatataaaaccactggtataactttaggaagtttaaaatttttatcttctatttcttcaaggctttttttcataataaaacttttccaaatttgttctctatacgatttcaatcttgggacaatttcagtatccatttctgtttgaaattctaacactatataatgtgatactttgccacttttagaaaataccttataaattatatcaacttcttttcctttatattcacatataaaagatgtttctaactctatatttttaagagttaattcttttgctattgagacacttgtaaaattttgaatcaaacttaaaaaactttctttatctgaatacattcttctgtactcttctcgtttttcattgcttctttttaaattcatacagttcctcctaggctatagaccttctatattttagtaaagatagtctataaattttattttttaattttcattagtgagtattgacagttgtgtgtaaaatatccagtaaagatatttttttatatttttattaaaagatataaatttttatattttaatatattgacatttacgttgcgtaaaagtgtatatttaatttataggaggtattacttatggaatatacagttcaaaaattaagtaaactagctggtataagtactagaacacttagatattatgatgaaataggtcttcttaagccacttaaaataaattcttcaggttatcgtatatatggtcaaaatgaagttaataaacttcaacaaatacttttttatagagaattaggaattaacttagaaaatataaaaaacattataaattcaccaaacttcgatagtttaagtgcgttaaaagaacaccataataaattactagccaaaagaaagcaaattgatttactaatagaaaatgtaactaaaactatagctctgaaggagggaaaatacactatgacagatatagaaaaatttgaaggttttaaagaaaagatgattgatgaaaatgaaaaaaattatggaactgaaattagagagaaatatggtaaagatattatagatacatcaaataaaaagcttaaaaatatgtctaagcaagattatgaaaattggcaaaacctaaatatcgaaataattagtaaacttaaaaaagcttttaaaactggtgatgcctctagtgaactggctcaggaagttgcaaaattacatcataaatggttgagttacacttggaacacatactctaaagaagctcattcctctctagcacagatgtatgtatatgatgaacgttttacatcatattatgatagagaacaacctggattagctaagtttttaagggatgctatagtaatatatacaagagataaataatataaaataataaaggtggtgtctcaaaatgaactttttagttcatgagacactcttttttgtatgaaatcaaatatatttttatcattttatcaatgaaaaacaagtttctctctctattttgagacagaatctttattgtataataattataatcaatacaaaataataacaaattatacaaaacttacttatactatttatgctaaaaacaaaaaatattttattaaagtttttaaaacttatgtaatataaaaatctatactatagacttgattatggaaagaaaattatcaaaatcattacaattagatatactatctctaatatcattgtcatgaattatctttaaaaggatatcataaatggagtttatttttatataatcatctttatttatagctaacatcatgattaatttaacagtagaatcttcactccaatatattggttcattcaatatggaaatacaaatcttagttcttatagagcttaattccataggatgaggtatagctaaaaaatcatctatattggtagaagataaactttctctgtaaaatacagattcagcaaatgatggaaatacaatttcactttgagttaatttgttgcacatcaactttataagctcatctttatctttgattttaggattaacaataaataaatttttatcaaagaaattgtccaaaagattactataaatatgggaattattagtgattgacttagatatattctctatatctttttttaatagttttaaatccactaatacaataggaatactatcatgatttaaaggaattgtcgatattattatatctacatctgacaattcactagctaaaaattgattaaatgatagacattgaagtatatttattttatcatgaaaaactttgtttaattgaacctctaataacctacttgaaccataccctgaaccacatactaatactacgtttttacacttaatattattttgaaaaaatctctctattccagcacctatatgcagggatacatatccaatttcatcttctgttaaagagtaaatactatttttaaaaactttttctatagcatttaaagttatttcaaatgctaaaggataattactctttattgtatttataaggggattcaccttatttaaattataagatttagaattgagaattgatttaaagtgcagtactaaatcatcaaataatacactatcatttctaaggtcaaaagtatattgattgttgattacttctaaaatttcttcaacatactctataattttagtatccaccctattggaaacgttatccaaaagagaacttttagttataaaatgattatatagataaactctgtctgcctttgaaataattatagtatatttactctcaatataattaaatatattttcaacagttgtattcgattgaaaatctgttaaaacaacatctaaaacattatctaagcagtaaccatcaagtattctacttatagtaatagctaaatggataataaagttttttagattaaaatctagaaaatttatattaaatttattaatttcacttaacactaccctttgaagctctattaaatctacattattaaataattctatttctctatctgtaattccaattatatagttttcaaaattcctatttatcatattattagaaatacatcttcgaatatctatttccttcccttcaactttaactccataatatggcttagaaactaatattaaattatactttgacaaaataggctttattctttttatgtcatttagtattgtaaatttactcacatacaagctattagctaaatcttctagttttatatatgtattgttatagagaatatattttaaaatatattgatttctttctataggagaatctggtatttcacttgaatccataatatcatcagatattaatgctagatactgttggtataatgctaaattaagaatatctatataatatccttctcctttttttattttaataatagcaccatttttctctaaagttccatttatagaagtaatatcatttcttatagttctctcactcacttttaaatgattacttaaagttttacaagtaattttatcatcactttcatttaataatttaaacaacgtgagcaatctcttgtgcataaatatccccccttatagaatttcttctaaattatactatttacactcatataatacaattactctaataaaattgtattataataatttctttccacttctatatggaaattagttattatcataatataaatttccatgtcgaagtggaaattagttatatttaatttaattaggataatgattacaatataaatataagttaagacattacgaatggagtggaaaaatatatggtactacaagaaaaatatatatttatagataaagacttaaaaagcaaagaagaagtattaaattttattgcagatagtgcttatatactaggtattgcaactaataaagaggctcttttaaaagaccttctaaaaagagaaaatgaatttccaacaggaataaaagatggatttgcgatacctcatacaaaaagtgtaaatgtaaaggaagcttccatactctatattaaaacaactaacgagttagagtggaaaactttagatgatagtaaggttagatatgtatttagtttgttagccccacataaaaatgaaggaaatatacatttaaaaactctatctaaattagccacatgtttaatggaggatgattttacaagtgaagttaaaaatgctagtgatgcaagtcatttagtaaaatatataactaataaaatgaaggaggaataattatgaaaatagtagcaataacatcatgtatagcaggattagcacacacacctatggcagcaaaagctttagaacaagctgcatcaaaaatgggtcatgaaatcaaagtagaacaacaaggtgctatgggacgagtaaatactataacaaaagaagaagcacaagatgcggactttatacttatagcatctgaccaaactatatctggaatggaaagatttgatggtaaaaaagtgataaaagtcaaaataggtatagcgttaaaaaaaccagaagctgtcttaacaaagtgtatagaagctatttcttaataaaaaaatctcactctaatatagaatgagaaaaataaaaaattaaaaaattgtctaatgtaattataacatattatcaaaaaatataacaaacttatataggaggattaaaaatgagtaaaaaaaataaatctcttttaagtgaacttaagggacacttaatgacaggtatctcatatatgttgccacttgtaataggctcatctttagttgtagctatcccaaagcttacagctttagcaatgggtataacaagtttagatgcttataaaaatgtatctggtttttatcatattctttacttaatggaacaagttggttggactggcataggtctattaaatacggtattagcaggatttatagcattttcaataggtgagaaaccagctatgggtgcaggttttattggtgggctcatagcaagtaatactaatgcaggattcttaggagcagtaatagcaggtttctttgctgggtatgtttgtaagtttttaaagaaaaaaattaaaatatctgggtcagcatcaggaatgatgccacttataataatgccacttataacagttggattaactggttttttaatgagtgttgtattagcaggacctttaggaaacataaatacttcattaaatgcttgggtagctgaaatgtgtcaaaatggaacaaattcggtggtattggctttaattttaggcgcaatgataggattcgatttaggtggaccagtaaataaagcagcttggatggcaggaaatgcattattgttagagggaatctatctaccagcgatattggtaaactgcgcaatagttatacctccactaggatatggtttagctacattcataagaaaatcaaaattttccaatgcattagctgaaacaggaaaaggcaatatagttatgggtataattggaataacagaaggtgcaattcctttcactttaacaaatccattaaaattagttcctgttaatatgataggatgcgctttgggtgtaggattatcagctttgttaggtgtacatgctataatgcctccagttggtggattatatggatttatatcaataggttctggatgggcttacttagtaggtgcaatatttggagctttagtaatagcaatattatcaacaactttagtagacttcaatgaagatgaaactacggaaaatacagaatttgatgaaatagagttagatataatgtaaattaaaaacttaattttagataattgagaattgagtgtactctcaattctcaattaaattttgggaggatttttatgaaaaagacaaaagtacatgtagttccacacagtcattgggatagagaatggtattttacaacatcaaggtcaaaaatatatttaatgaaagattttcaagatatattagacatattggaagaaaaagaggactttaaatactttactatggatgcacaagcttctctcttagatgattatttaaaatggagacctcaggatgaatatagaataagagatttagttcaaagaagaagattagttattggaccttggtatactcaaacagaccaattggttatatcaggagaatctataattagaaacctttactatggaatagatagatgcaatgaatttggtgaacctatgagggttggatatgtaccagattcttttgggcaatcagctcaaatgccacaaatatacagaggttttggaatagatagttcattattttggcgtggagtttctgatgatatggtagatacaacagagtttatatggaaaggttctgatggttcaaaagtattagcagttcaaataccatttggttattactatggaggtaatataccagaagatgattcagatttaaaagaatatttaaaagatataattggaaaacttaaggttaaagcttctactaataacgtatattttccaaatggatttgaccaagcaccaataagaaaaaaccttcctgatatattaaaaaaagctaatgaaatagataatgaaaatgaatacgaaataagtaatatagaaaactatatagattcagtaaaaaatgaaagaaatgaatttacagagcttaaaggtgaatttttaaatgctaaacatatgagaatacacaaatccatattctcctcaaggtcagaccttaaaataatgaataacaaattagaaaattatatcacaaatgtacttgaaccattattaacattaagttattcacttggaaatgaataccctcatctagttataaaagatatatggaaacttatgtttgaaaatgcagctcatgacagcataggttcttgtaatagtgacacagcaaatgaggatgtatacacaagatacaaacaagccagagatttgagtataaatttattagatttgcatatgagacttataagtactcaaatcaaaaataataatgaagaaataacattaacagtattcaatggattcccagaagtcagaaatgaagttgtagaatttgacacttatattccaggtcaagattttgtgataaagaataaaaatggagaaattcttaattatataataaaagaaaaagaagatattacaaattatatattaactcaaacaataagattaaacccaagtaaaaaaatatatatacccaaaactgtatatagagcaaaaattgcactttcagtaaaagatataccaccaatgggatatactcaactagtttttgaattggatactaaaaataaatgtgaaatagaaacaagtaattgcaaagaaatagaaaacaaatattacaaaataacagccaataaaaatggttcattagaaatattagataaagaatctagtaagacttataaaaaccaagctgtaattgaagacaatggagatgatggagattcatacaactattctcctccaagaaaagatatttatgtttcatctttagattctgtatcttcagtagaagtgctaaaatcaaatattcaagaagaaatgatacttaaatattcattgaccataccagcttcactggaagaaaggtctataggtaaagtttctgtgaaaatgccagtaacaatgaaaattaccttagaacctaaagaacaaataattaagtttaatgttaatataaaaaataaccaagcactatctcatagagtaagagttttatttaatacagaaatagcatctaagttttctatagcagatcaacaatttggaataatacaaagaccaacagtattagaaaaagaccttgcattatggaaaagagacaattactcatggcaagaaaaacctataactatcgaaccaatgcaaagttttgttactttagaggatggacaaagaggaatagcattaataactggttgtgtaagagaatatcaaatagttggtgataatttagatacaatagcattaacactattcaggtcatttggatatatgggaagagaaaatttactttatagaccaggaagagcttctggagaaaaaataatagcaacaccagatgcacaattacttaaagagttaaactttgactttggtctttacatatataacaataaatttgatgaagcaaatgtagctaatacagctaagagattcttaacacctatacaaatatatgaatatgctgattttttaaatggtagacttctatttgcattcaatgacgaaaaacaaatatatgaaaatgaatttagtttgatgaatgtaaataattcaaatttcacagtaagtgcaataaagaaagaagaaaaaggagatggaattgtagttagaatcttcaatggtatgaaaaatgaggatgctaagggaagtcttaacatcaataaaaatgtcaatgatgcttatagtgcaatgctcgacgaaatctatgataataatagcaagcttaaagtaaatactaaaactgtagaggtaaattctttatcacattgtaaagtacaaacaatagtaattaaataatataaaatagcttatacaagatttcaaaataaattgctagtactatgttaatagtaaacccagatattatgctatttataagctctgtaacactaaataacattttgtaaaataaaaaggtgaaccttgtatattaggattcaccttttttaaataaatcaacattctgttttaaaataacatttataagctgttttgaaataatacttacaaattattttaaaacaatacctataaatttttatttaaagaatacacataaatatttccagactcttttattctatagactttataattattaaagaagtctaatctaatttttgttaaaagtaattgtaactttaaataaatcaccatccacacttatattcatcttaccaccctgtaattctataaaactttttgctattgctaaaccaagaccagaaccttctgtgttacgtgatttatctcctcttacaaatctctccattatatcatctacactaaaatcaatctcagatgcagacatatttttaagcataatatttactttattatctgtttctaaaatatcaatatacactcttgaatttggcattgcatatttgcttatatttattataagattttcaaatactctaaatgtacgctgactatctaatggtaatattattttttcattagaaaagttattctttactattagagatgaatctgcaagtttgtcatctaattctaaaagtgtctgcttcattagagatacaatatccacatttactatattcaaataaacatctccactatttgccttgcttacttcaaacaaatcttctattagatgttgcaatctttgtgactttctgtctaatgtatcaatatacaacttacgattttcatctgttatactttcatcttttaataaatctatataagtgattatagatgttagaggtgtttttaagtcatgtgatacatttgatataagctctgttttcatcttttgactcttaacctcttcgtcaacagcttttttaaatccagtttgaatatttcctaattcgtcttttataggattaaaaaatcctaaatctttttccatatttacatctaagtttccatctgaaattttctttgtaacatctaaaagttgattatattcatatattgtctttttagagtaatctgacagtatcttaaataatactactgaatatattaatgcgagtattattccaaagaaccacatactacacattataactataatcaataaatttattcccaaaattgtaactatagttttatttggcttttcttttagatttattgttctaatttgattaataactgtttttcctgctttttttaaccatacaaaaaacattcctgtcacagtatgttttgtaaaatactctcttattccaacatttaaaatatgttttaaaagtattataaatacaaatattattgagaatattacaaaccaataagttaaattcattaaacttaccaatatgctagccattttagcacttatgtcattgtttataaggtactctacataattcccactcaaggtattacttattataacagtaggatataaatctacaagcccctgtataatagcaagagcaataaagagtatctctaacggtattcttaataatgtatcaaatcctagcaactctttagattttctatatgggaatgctaaagctacaataacaactatagctaatataatttttaaaatcattccagaaatcttataataagaattattttctacattgcttatatatgaaattataccatcatcaaaataagtatttccataaccatactctacactatcacctttacttattactttaggtacagcatatactaatgttatattttttattggagataacttatatgaaattgaatttcctcctaaacttgtatccattaaatcttctcttgctttagataacaacatttgattaataactttttgatttactccataagaatccacaatatttacttttccatctttatcaaaattcattacaacgtagaatctatagttttcctttatatctgtaatctgcttttgtctttcctcatcattcatttctgtattttttgactgattttcatcagaattttcttttgaagcatcattctttgttgtatcaagtactcctaattctttattatcattaaaaaattcaaaattgctttctttatcaactaaatagtactttaaattctttcctgacgctttaatgaaatgctcccaattttcaaagttttcattaaaatctgcattaatactatcatctgtataataagtttctgaaccatcataagtatctttttctttacttacattttttatatagttcatagtttcttcattgataaatagctttgatggttgtatcatcttaccttcttgttcttccttcatattatgatataaaacataacttcctttatatatactatctacaaagctttcctgttcaaatggattctttgctccacctttagcacctgcttgtatagtagaatattgactaatcatacctaatgatgctgataacataagtataaaaactataatagtaactatatatttatctttaaattttttcaattttgtatccaacaccccacaccacctttaaatatttaggattttttgggtcaatttctatcttttcccttatattcctcacatgtaccataactgtatctgtatttatagcattttcattccaaactctttcatatatttcatcagcagaaaaaactcttcctgcatttctcataagtaaacttagtattttaaattctataggagttgtttttatatattttccatcaatattaacttcttttgtattttcatttaattctaatccgcctattgcaaacacactatcatcactttctaccttttgctctttatttccaaccatgtttagatacttagtgtaccttctaagttgtgaattaactctagccaatagttctaatggcttaaaaggttttgttacataatcgtctgctcctatattaagccccattattttgtcaacttcttctgattttgcagatagcattattactggaaaattatagttttctctaagcctcattgtaagtgttataccatccattttaggcatcattatatcaactatagctaaatgtatttcttggttttctataaccttaagaccttctaatccattgtatcccttaaaaacattatatccttgatttaatagatatatctctatagcatctgcgatctccttttcatcttctaccaccaaaatattatatgaattcattttaatctcctttatattaatttataaattttctttacatatatgattatacaatatgatagaagtttttccatttatatatatatttatatcttttgttctggttatttgtatttaatgtccatcttagaaacctccttctagtttaaacttaatattttttcattttgttttatatacttaatattaaaattaaaaacttaagatattacatatacttttctaaagattttctaaagatttaaatatatttagaattaatatataaaaaaaagtagttcttattgtattaattaaatcaatgatttgaaatataaaattaatatcaataaaacctactttttaattttttaaatatttatttttaatttatcttgtttttaatttactttgattttaaaatgtccttgacttttattttataaatgtacatatttcttctactggttttttagatggactcttcaaattgtcctctggcactccaagagctaacattgcacctaaaaaatactctcccttttcaaaaccagtttctgcttctaaaacagcttctatctcatctgctgcatagttttgacttgtcaaccaacaagaaccatatccaagttcaattgctgatagtgtaaagttttcaattgaagcacctagactctgcatacctggatttcttataaataatttatctatagtctccttaggtgcatctataagctctaattcataatatcctgatggattatatacctttgtaaaaactaatactaaaactggagcttttaagtaaaatagtgtaaagtttttaacaaattttctaaatctattagccttatccactgatactttatccatttccacaagtatttcttgttgctttttagttatcacatctgctatcttttccattaaatcacggcgttttataacaacaaaatgccagttttgaatattcttgcctgatggtgctgcacctgctgcttttatcatttttaaaatatcttcatctgatacatcttgatttttaaactttcttacactttgtcttttaaaaatagtatcttgtaattccatttttaaatccccccataacttttttattattttaatataatttttaaactcatcttattttaatatatcatgttctaacaaatctttaaatgaatctataaaataatcatatacatctacattcccaaacccatatttggcatatataaaaggtatacctacaaacttagcactatttgcatcaccttgcgtatcaccaacatagattggatttattaatttatttctttcaattataagtttattattttctcctttatgcaaaccagtattaccaggacattcaaaatctataaaatactgttctagtttatgtgcttttaaaaaagattctatatatccagcttgacaattacttactataaataatttatattttttagatagtaatttaagagtatcttctatatcatcaaataatttagctccattttcagataaatagtcacattctttcaaagaacattcattcaataaattcattctttcttcttcacttaaatttggaaataaacgatttgctatttcctcaaaagaaagccccataagacttctaaataaatcttttgtgacacttaattctatttccttatgtttacttaaaacatcctgccagactttgcatacttcttcagttgaatcccacaatgttccatctaaatcaaaaataatactatctaccacaaaaaatcccccttatgtcaaagtttattatatatttataattatatactaaaaagcagatacaatcataaatatattttacttgattgtatctgctctacaatataaaaccaattgtcaaaatcaaattttataaatttctaactacaagtacacagccttgctctactttaatcttacaagaattactcaacataacatttgatattccaataggtacagagtatttcatataataattatcgagagggtattctaagccagtaagtgttacacccttagcatcaccttttatagctgttacagaaacagtgtcccctgggtttccatacaatgaaatttcctcattttcaactatatacatctcttctttatcagaaagtatcctagaatatataccatcttcttttaaataatataatagctttatatttgcaagagtgtggtcaatccttccccctaaagcaccaaaaaaatcaatatgatttgctttaagtgtcttagctaaaaaaagacaaagctctgtatcagtctcatcttttttagatggaaatttttcaaatttaacacctttatttttatagaagtttatcttttcttcttctactgaatctaaatctcctaatatataatctggcattatttccattttataagtgtgatttgcccctccatctgcacatattatgcagtcataacattccttaattataatatctcttgtaacttcgtaatcttcaatttcgccatttaaaacaatacagattttcattattaaatttaaactaattcttcaagagaagcattctttctaaataaattaactgtttcttgaatgtcatcacttccaaatattgcagaacctgctactattacattagctcctgcttgtacaacttcggctacgtttttagggcttataccaccatcaacttctatatcaatgtttaatccttgactatctataatagcttttaactctttaatcttatctaaaacacaaggaataaatgattgtcctccaaatccagggttaacagacattaataataccatatctaaatcaggtagtacatgtttaatcgtatctactggtgtagctggattaagtactacaccagcttttattccatgtgattttatattttgtatagttctatgtagatgaacacaagcctcctggtgaacagttattatatcacatcctgcttttacaaattcttcaatatactggtctggattttctatcataagatgagcatcaaataccatatttatattttctttctttaaacttttgactacaagtggtcctaatgtaatgtttggtacaaagtgtccatccattacatcgatatgaagatattcacatcctgcactttctacttttcttacatcttctaataattttgcaaaatctgctgataatattgatggtgctaatttaatcatttttctaatacctcctactattattttgtcttatttcatgtagcagctgtatataactatcatatctttctttagatatttctccatttgtaacagcttcttttatagcacaattaggttcattttcatgaatacactttgaaccaaacttacaatcattaaatttatcaaattctataaaataatctttaagttcaacttcctctatatcttcaagtgcaagggaactaaaacctggtgtatctgcaaccattccaccaaattccaattttaaaagttcagcgtgacgagtagtatgttttcccctttttattttatcacttaccactcctgtttgaagtttaaaattttcatctatttcatttaataagcttgattttccaactccagatggtcctgcaaacactactacattttcttttaattcttcttttactttatctatatttaacttagtaatattgcttacaggaatgactttatagccactaagttcatatatatttttaacagtttctaatgtatcattatcatctaaatctgcttttgtaaggattattacagtttctaaattttctttttctgccaaaactataaatctatctaaaagagataagtttggtttaggattttttattgcgaatactattaatgctttatctacatttgcaataggaggtcttataagttctgtatctctactgtcgatttcttctaagataccctttttttcatcttcatcaacaatgcttattttgactctatcaccaaccaaaggtgttattttctgctttctaaatatccctctagccttacattcataaataccattataagtatctacataataaaatccactaatcccctttataatttttccttctagcatcaaatgcctccctttataaaatttatataaacacatactgtttatgaatagtatatcgtgttattctttcctatttttatataataccacattttttttaaataacaaatcctccgtttggactaattacctgaccagtgataaaatttgatttgtctgatgccaagaaaatagcacaatttgctatatcttctggagttcctagcctcattagaggggtttcttccacaagagcgtctatatcttcctcattatatccagataacatgtcagtattaatgacacctggagctatgctatttactctaatatttgatggtcctacttctttagctaatgcctttgtcatacctattatacctgcttttgttatagaataatgcacttcacaagacgcacctgatataccccagattgaagatatattaattatatttccttttttttctgatatcatgtattttaaagcaacttgcgaacaataaaagcttccttttaaattaatattcatcatattatcccaatcttcatcggttatatctgtaaacaacttatcttgacttacaccagcattgtttacaagtacatccaatcctccaaattcttttatacaataatctaccatattctctacatcttctctatttgaaatatcagccttaaaaagttttacagaaaaatttttttcatttaatatagtatacaactctttagcttcattttctgacttattaaaatttactaatacattgtaaccttcttttgcaaaagctttagacatagctttaccaatccctctagctcctcctgtaattaaaacggttttcttcttcataaatacttttctccttatattataaccaattcagtattttatacaaaacaaactgccctttaaagaaaatattttctataaaaggacagctcttattttattaatatttattctgttttaccaatgtttgcgccagttcctgatgaagttcctccattatctcctgagtttgagcctcctgaactatctccattgtctcctgagtttgaacctcctgaacttcctccattatctcctgagtttgaacctcctgaacttcctccattatctcctgagtttgagcctcctgagcttcctccactatttcctgagtttgaacctcctgagttacctccattattgcctgagtttcctccactatttcctgagtttgaacttcctgaatttccaccactgttccctgagtttgaaccaggttctgttggtgtattattctctggtgttgttggttttttatctggtactgttggagtctgtgtatttgatttttctgaacctttgcttacatataggtttacctcatcaccttcctgagctcttgatgagccagcacctggactctgacttaaaactgtaccttctttatatattgagctatattcatacttaacagttcccacttttaagttattttcttcaataagttgttttgcattactcaaagtaagtcccaccacattaggaacagatgcctgacttgaacctttacttacgacaacatttatagtatcaccctttttgacatttgtacttccaccttcaggtgtctgtgatattatacaattttcatcaacttcactattatactcttcactttttacactcaggtataatccttctttttcaacagcactttgagcttcttctaatgtcatatttacaagattaggaacagtcaaagatttattgccaaaccctccagcaaataaaaacttatatgctaagaatacttgagcacacaatatcagtatcaaaacagccgcaattacttttaatcttcttctagattttgggctttcctgttttttcttctttttcttagttctcttacttggagtactcttaggtctctgattctttttagctctcattatctcttcctcttcttcttcttcttcttcatcttcttcataaaaatcatcatagtaatcttcatcatcatccaaatcagctacttcaacaggcttaaccactttttcaggagctggttttgcaagtgttggatttacaactttattaatttctttttcatcaattttcttagttgcaaaatcatcatattcttttataaaatctaaatcaatatttttttctatatactctatatcttctatcaattcttcagcagtttgatatctatctgcgctagatttttctgtaagcttttttattgtagttcttacactttgaggaatcctaactttttcttctgatgtaaagtctatatcatcattaatgtgttgaagtgctatagaaattggactatctcccctaaatggaacttttcctatcaacatttcatataaaactatacctagagaatacaggtcagcattattagttacaaatttacctttagcttgctctggtgaaaaataatgcactgaacctattatactaccaatattagtcattgttgaatttgaaacagctttggctataccaaaatcagccacttttactactcttccttcatttgatatgagaatattatgaggttttatatctctatgtataatcccctttttgtgcgctgcactaagtgccatagctatttgttttgttatatctaatgcagtatattcatctaatataccttcatcttgtataatctcttttagattcttcccatctacaaactccattacaatgtagtgaacttttccatcttcaccaacatcataaacatttactatatttggatgtgaaagacttgctactgcttctgcctctcttttaaactttgttagaaattcatcatcatctacaaattcaggtctaagtactttaagtgcaacagtcctgtttaataatctgtctttagcctcatatacaaaggccattcctccatcaccaatcttcctgatgatttcatatcgatttcctaaaattgtatctcccacaatatcaccgtcctaattatacttttatcactataaccgaaacattatctttaccagaaacatcattggccatacttatcaattcttcacttatattactagttctctcatattcataatctaatattaaatctcttatatcttcatcatcaataaacccagttaatccatctgtcgcaagaagtattatatcactttttttgatttctttcttaaaaatatctacaacaaccatatcatctgttccaattgctctagttattctatttctctgtggatgtcttcttgcctcttcttctgtaatgacatgggccatcataagttcttcaaccacggaatggtctatagttattttatcaaatttttcatctgttaacaaataacatctgctatctccaacatttgccacatataagacattattatacactatagccgtaactaatgtagttcccattccttcaaattctatatcttccatagattttttgtgcacaattgagtttacattattataagcctgttttaatatatcatctatatagtctatttttacattatcatgttgtaataagttttcctttagaaaatcaattatattttctactgctaatttactggcgacttcaccttttttatgtccacccattccatcagctatggcaaatattcctattggaccatgttctgtatctataacttctccctcacaatagtcttcattgttttttcttatttttcctatatgggaggcacaactataaaccatacgacttcctccttacaaattacttgtattttcttctcaattgaccacaagctccactaatatcagaacccatagacatcctaactgtggcaggtatattgttcttctccaaactatccctaaatttataaataaatgctttatctggcttttcgtattctctttcttcaactttatttattggaattaaatttacatgacatagcataccttttaggagcttagctaatgcctttgcttctttttctgagtcatttactccttttataagagaatattcaaatgtaacccttctatttgtcttttttatataatatctacatgcattcaatatttcttcaatagaataagcatttgctacaggcataatttttcttcgttcttcatcatatggtgaatgaagtgataaagctaaatttatagctatttctaagtctgccaactcatacattttaggtactattccacaagttgaaagagttatatgtctataccctatattaagaccatttttttcgttaattatttttaagaattgttttgtattttcaaagttatcaagtggctcaccactccccatcaatacaagatttgataccctcttaccagtatcttcttgaattttaataacttggtctaaaatttcccatggctctaagtttctaattaatccatccattgtagatgcacaaaaattacatcccatcctacaacctacttggttagaaacacagacagtaactctactatcataatccatcatcacagtttctattatatttccatcatctaataaaaacaaatatttttttgtattatctaccttagattctaactttaattctatatctatattccctatacatgaaacctcttctaatttatttctcaaactttttggtatattgttcatatcatcaaaagtttttgcacccttatatatccaagagaatatttgacttcctctaaagggcttttcatctatagttttcataaattctttaagttcatcttcagtaaaattttttaatactatctttttcttttccattctctcactaccttattctctttaattttgctatgaaaaaaccatctataccatgaatattaggatatatctttaaatatcctttatcttgattgtctaagtctacatttactgtatcaattggaacaaattcaaagttgtgattttcttcaacaaaagaagtaactatatttatattctccacatcttgaattgtacatgtactatatactaaagttccaccaactttgacatatttagatgcattttctaaaattttcttttgtatagaagtgatgtcttttaactcttcttctttcttatacttaatttctggtttacgtcttattataccaaaaccagagcaaggaacatctgctaaaacataatcaaatttacttatactattttcatcaatctcagaagcatcaaatctttctacaaacacatttttaagccccaatctatttacagtagagtttataagctttagtttatgctcaaaaatatctctagctactacttgacccgtattgttcattaaagtagctaagtgagtagatttccctccaggagcactacatacatccaaaacaaatgaaccttcttttggattaattactttccctactatcatagaacttatatcttgaattgtaaataaaccagccttaaataattcatttttttctatatttttcattttttcgactttaatagcttcttctaccataggaacttttaaacatacaatacccatttcacttaatttttcaataagttcttctctacttattttaagtgtattcgttcttatatagatactaggcttttcattatttgcttccaacaaatcttcagcaaattcttgtccaaatttatctatccagttttttataatccaagagttataggaatactttatagataagtattttacactatcttcctcagttatgtccattatagtctctttagctcttatttcatttctaagaatagcatttatgaaaccagaagattttttatcatatttcttagataattttacagtttcattaactgctgcataatctgatatactatctaaaaataaaatctgatatgttcccattcttaaaaagattttaacataagttgacattttttttacctttatttttgaaagtttattgattatataatctaaataatatttattttctattactccataaattaactctgttgcaagtcctctatccatatcacttatttctaaatttttaaaatgcttatttattgcaatatttgaataattgtcatttttttctatatcacataatactttaaatccaacttctcttgcatccatataaatttctcccttttattaaacataaaaaagggttgtttctaaacaacccactttacttttagtcatttcttctttgagctattagtaacaatctaagtaattgaagtattgaaaccaatgctgctgcaacatatgttaaagctgctgctgaaagtactcttctactttgtcttgactcactttcatctataatacctaaattcccaagttgaacgattgctctacttgaagcattaaattctacaggcaatgttattatttggaataacactgaagccgaaaacaatagtataccaatttttaaaaatggaccagccataataaatcctaaaaatattaaaaaccaagatatacttgaagcaaaattcactactggtactaaactacttcttatttgaagaggcgcataacctttagcatgttgtatggcatgaccacactcatgtgcagctactgcaacagaagttatagatgttccataatatacatcttctgacaaccttacagcctttcttcttgggtcataatggtcacttagatgccctctaaccatttctatctttacatcatacaaaccatttgaatcaagtactcttcttgctgtttgctctccagtatatcctcgacgtgtatttactcttaaatacttatttgttgttgaactcactttaaattgtgcatatatagtaagtaatatagctggaattaatacaaccattgttgggtcaaatccccaaaaaccgccatatacagggtacataaataacactctcctaaaatatatttttattatacatcctcttaatattcacttaacttaaaaacagtttaattacaaattaatatattttttcctgttaaaaagtctatagctttttcaatatccatcatgtctacattagtatttacacaaggtccattaggtcttttgttaaatacacctaaaacaggaattttcttaatatcttgtattccagatgtcaaatctctttcacatgcaacagctacaacagctttaggtttattatccattataatttttctagctagggttcctcctgtagctacaaatatttttacattagttttttcctttagcttaattaattctcctacgttgcatcttccacattctttacaattatctatatcattagtaacttttaatttacaactattctcttgaatacaatgaggtattaaaattattatatcctctggattaaaattatatttattactgtatatatattcattatttaactttatatatattcttctaatatcactttttgacataccaaatgatgatgcaatgaaagatataataggaaataatccactgacaatattaaaatttattttcattatatttgagttaacatactttcctttaattactctataagtaactgctgttgaacatagtattataagtattagtgatattattataatatttatcatcaaggagaatatttgagttaaacttattataaaaaaattaacaactcctatcaaaattcctaatattaaaatcaaaatcccaacacttgttaaatacttctttatatctgtcatacttttcacctaacccaatactaaaccagtttctatagtattcccttttatatattcaccaaccaacattctctttttattcggcatctgaatttcttcaattaaaagtacattatctatagtacttacttttatcccatctttgcttacatcaattattgtacctacatcttttgtgcttttttcatctaacactttagttttccaaactttcattatgacatcattatagatagtataagcacttggccatggatttactcctctaactaaattgtgtatttctctggcactttttgaaaaatctatgttacctaatgatttattcattattggcgcataggaaaattcttcatgattttgtacttctcttggagcatttccttcttcaattaatcttaatgtttcttttaaagtttctgctcctatattcatcattttatcatgaagttctcctgctgttatattttcatcaagatttacttctgtctttagtatcatatctccagtatctaacccttcatccatatacatagttgtaacaccagtcttttcttcaccatttattattacccaatttataggtgccgcacctctatattttggaagtaaagaaacatgaacatttatacatccaagtttaggaatctctaatatttcttttggaagtatctgtccaaaagctacaactactattacatctggatttaaagatttaattttatctataaattctttatctctagcctttactggttgatatacaggtatattattttcaattgccagttcttttactggactcatacctagttttttacctcttccttttggtttatctggttgagttacaacacccaatatttcatacttctcatctattattttttgtaaacatggaactgctatatcaggagttcccataaatactattttcatcaaatcaactcctactacttttctattttgtcaacaaataaaattccatctaagtggtctatctcatgacaaaatgctctagctaaaagttcttctccctctaactctattgtttcgccatttctatttaaagctctgacctttacataatttggtcttctaacatttccagcttctccaacaacacttaaacatccttcctcatctatttgctccccagatgtttctattatttcaggatttataagttctataagctcttctccaatatctattactactactctttttaatattccaacttgaggtgcagccagtccaacaccatctgcatcatacatagtttctgccatatcatctaataattgtattatcttttcatcaattttttcaaccttttttgatttttttcttaatactggttctcctatttgaactatttgtcttaaagccattataattcctcctaaatttataatacactgtttggattaatatctatagatacattgatattcttatcaaatatcaaatctcgttttgttatacatatatattttattataccctttaagagattaatttcaatattttcatctttaaagagtatttgccatctataattttgatttatttttgatattgaacatggatttggacctaatataaatcctaaatcatttataccccttttttctaataaataaatcaatgatgcatgcatattttttatattttttatcactaatctttcatcttcaccactaacaactacacttaacatattattaaaaggagaatatccaaatgcttttcttatttttatctcatcttcataaaaaccctcataatcatattcaatagcatgcttaatagcatagtgttcagtgtcataagtctgaagtactacttttccctctttatcagctctccctgctcttccagagacttgagttatcaattgaaatgtagtttcaaaacttttaaagtctggaaaatttaatatcatgtctgcagacaaaatacctactaaagttacattctcaaaatccagccctttacttaacatctgtgttccaataagtacatctgcttctttatctttaaatttatttagtatctcatctaaagcacctttttttgaagttgtatctttatccattctcaaagtttttatatctggaaaaatatattttaattcctcttcaattttttgagttccaactccaaatggcttaacataagtacttttacattcaggacactcttttggaatttctttctcatatccacaatagtggcatcttccagtattgcttttcttatgataagttaaagatatatcacaattttcacattgaaacacatatccacactttctacaagatacaaaatttgcataacctcttctgtttaaaaatagtatcacttgattattttcttcaatcgcataacgtatttctttttgtaatttcaaactaaatatacttctatttcctttatctaattcatctttcatgtctaccacttcaatgtttggaagaggcttatcatttgctctactttttatatttataagtttgtattctccagattttgccctataatactcttcaattgagggcgttgctgaacctaaaataagagttatattattttttaatgccataaatctagcaacttctatagcattaaattttggattcttctcagacttatatgatgactcatgacattcatcaattattattaagcctaaggaattaaaaggtgcaaataaagctgacctagctccaattaacactcttactttacctgctttgacagctttgtaaacatcatgtttttctccttcagatagtttactgtggaacactccaactaaatctccaaacctactctttagcctatctattgtttgaggagttaatgctatctcaggtactaagaatatactgtctaagccttgatttagagcaaattctattatttccatgtaaacttcagtttttccacttccagttactccatgaattaagtatggttttttatcatctacaaacatattcgactttatctcatcaactgcttcttgttgttcattgtttaattttatactttttagtacggatttgtaaatactttttggctctctataataatccttaaattctagggttattagctttttcttacttagagaatttatactttgttttgaagcatttaataaatccaataaatcatttatctctacattttcattatttttaagaaaacttaatatctctttttgtttacttcccacatttattttattttgctctatataatcgtcaatcttatcactttctaaactcaaagatatataacatactttcttttcatttttgtgatttttatattcccaacataattttataattccatttttattcattgtgtacaaagaactatttaagtttggtatatattttaacttatcaaccttaattttacctttactatcaatcactttctctactatttctctatttttatcacttaaagttgatattttttccttcaattcaatctcatttaatccacttaaactttcacctaataggactactttataattatttaatttgtatccctttggatatatcaaatttatacattctatataagtacacaaatatctatttttcatccaataaaccaactctaaatcttcttttctaaatattggattttcatctaatatatcaataatttcttttatttttattttttcatctaagctatctgtaaattgaaatacaaaggcttctgttggtttattaccttttccaaatggtactaatattctgtgcccgatttttattacatcagataaaaatacaggaatttgatatgtaaataaattatctgtatatatagtattacttctaactattacctttgcatattttttcattataaaacctctacttaaatttaatatattgttcatattttaatatactttacaagatattaaaatctcagaatttataagcaatttcaagttattaatattaactttattttaataattaactattaattatattttatactttatgacaaaataaatgctgaaaactacaatttaactgacatttgcgagtttttactcgctaaaattaaattgcagctttcagccactttagctgtgataaaatacacaaatatcatatttaaaaaaggtcttatttctcaagcaacgctttaactttatctaaaataacattggctacttcttcttttttcatcttaggatactcagtaatatttccctctacatctattatttttacaatattagtatcagctctaaaaccagcaccttctttagttaaatcatttgccacaataaaatctaaatttttcttttttatttttcctttggcatgttctataaggtcattagtttcagctgcaaatccaattagtatcttatcttcttttatttttcctatttcataagcaatatcataatttctacttagttctattgataaatcatcattcttctttttaatttttttgtcagaataagtttttggtttataatctgcaactgctgcactttgaattactattttattttcacttaaatttgatactactgcttcatacaaatcttgtgctgactctatttgaacaaattttttaagattttgtggaatagaaagatttgtaggacctgatattaatgttacatcagcacctctagctatagcttctcttgctatagaatatcccattttaccagaagacctattagttaaatatcttactgggtctatactctctacagttggaccagctgtaactatcatactttgaccttttaaatcttgctctttagtaagattagtcaaaacttcctctactattatgtctggattagctaatttgcctgttccaatatctccacatgcaagcctcccactttctggttcaataaatttatatccaaagctctttaaagtttgtatatttttttgaacaattggattttcatacatattagtattcatagctggtgctataagaacctgtgctttggttgccataacagtagttgtcaacatatcgtcagctataccatttgcaatcttgcctataacatttgcacttgctggaactattaagaataaatctgctttttttgctaatgatatatgttcaacttcccaagtttttggttcttcaaacatatcttctactacataattttgactcagcgattgaaatgcaagtggtttaacaaattctgttgctgattttgtcattataacatggatatttgcatttagtttttttaacttacttacaacatcacaagccttatatgcagctataccgccacttatgccaattacaacagttttatcttttagcatgaccttactcctcttctgaaatttgttggtgttgctcagcatgatgtctagcttcttctatctctatttcctcttctgtcaataatctatatgttatttttccacttgcaacttctttagttgctacacatacaggcttttccttagttttatttgaaacatatggttcttctccatcaattaattttcttgctctctttgaaacagtccctactaaatagtatctgttgtctattttttctagtacctcattgatagatggttttaacataattataattcctccttaaatttctctattataatatttttatatctgctaactttattcttttcagatgatattataccttctatttctttagcagatgtttttacatcttcattaaatataaaataatcataatccttaatcattttaatttcttcatatgcacagctaaatctcttctctatttcagcttctgtttctgtacctcttccaacaattctattttttaattcttcaagtgatggtggtagtacaaatataaatactccctctgggcaaacttcttttatttgttttgctccttgcatttcaatctccagtaatacatcttgtcctttttctaaacattccattattgccgcttttggagttccataaaaattatcataaatttgagcatactccaaaaactcacctttttctatcatctcttcaaacttttccttacttatgaagaaataatttactccatcaacttctccagttctgggttttcttgtagtagctgatacagaaagttttattgtatcattttctttaagtagttctttgcaaatagtaccttttcctgcacctgatggtcctgatacaactagcaataatccttttttcacaaacatttaagcattccccttctaatattgtattcttactctatattttgtatttgttctcttattttttccaattcgctttttacttctactactaaattagttatatttatatcagatgacttcgaacctatagtgttagtttctctattcatctcttgtattaagaaatctatttttctacctatagagtcgtctttaaatatagtatttttaagttgccctatatgacttttaaatctaactatttcttctgttatactgcttttatctgcatatattgcaacttcttgtgctaatctattctcatctattatacttgggtcatccagtaattcacttattctcaaattcaatttttctctataatcttctacaacactacttgaatatttttcaatctcttctatatgattttttaataaatcacatctcatggcaatatcttcagctaattttttaccttcttcacttctcatttctcttaatttgattaatgcatcttcaactgcttgattcaacattgaccacaataaatcttcatcttcttccttttcttctattttcacaatatcaggaaactttgcaacattcataacgctaatatcatctataatatcaaatttattttttatttcttttagtatgtctatatactgagatgctaatccctcatcaaaatttaagtttacatcttctttgcctaataagtcaaactttatgtataaatctactcttcctctttttacataattttttactaaatttctaactttatcctctaaaaatgaaatttttcttggaagacgtatgtttatatctgaatacttatgatttatcgttttacactctactaaaaagtaataattatcatccttgtattctcctcttccaaaaccagtcatacttatagccattaattaaacctccaaaacaccttcacatatttttactgctggacctgtcatataagagaaatctcctacatctattttaactgttccaccttgagacgttacatttacactactttctaccatattaagtaaattgcacactattgctgatgcagtcataccagtaccacaacctaaagtatatccacaacctctttcccaagtataaacatgtatattatacttatcttctacctttacaaaatttacattcgttttttcaggaaatattttattattttcaatctcttttccatatttacaaacatcatctacatctaattcatctactataactactgtatgaggaacccccatcaacatagaagtaactttaagctccctatctaaaacctttatactttcttgcacaaaacgttctttatttgtaagtacaggaacatccttagctataaaacttccttttcccatattgactcttatagagtttatttctctattggtaagatttatttttatatcttttataccatctaatgtatctactgtaaaactttcttttttaactatacaattatcataaacaaatttacaaaaacatctaaggccatttccacacatagctgctcttgaaccatcagaattataatataccatttctacatctgcaacttttgaatctttcacaactaacaatccatccgctcctacagaaaatcttctatggcatactttttttgctaaagcagtataatcagatggatttatctggtcgaatcttccatctattgctataaaatcatttcctattccatgtagtttccaaaatttcataagtatcgctccttcgtaaattaacgcttaaactattataacataaaaaaattcccataaacttataatttatgggaaaagttttgtaatgacaactataatttgaggatgtgagggagagttgtcattacaattagggtaattatattatgtttttaagctagttctttctatgtttatatattaatatttctatatgaattttatgtatgttttatttaaactgtctatgaattttttaattaaacatctggtaaccagctataatccttttagtagatatctattaacatacacctattaattctttaagtgtttttaaaacatagtctaaatcttccttagtaatatctacatgagttacaaatctatattcaccattttccattttattaatttttatatttctttcaaaaaattcttttattaaaacatcctcttttataatatcttcactcatcttaaaaaataccatacttatatctggattaacattgtttacttcaatgccatcaattttatttaattcacaagctaaatattttgcattttcatggtcttcattcaatcttaaagtcattttttcaatggcaattataccagctgctgcaactatacctacttgtctcattcccccacccataactttttgctttcttctagcttttgctataaattctttacttccagcaagtatagaacccattggtgcagctaaaccttttgacacacagaacataacactatcacaacactttgctatttctttagcttctacacccaaagttaatgctgcgttaaataatcttgctccatctaaatgtactggtaagttgtgtttctcagctatttttttaatttctcttaaattatcaagactcacaacagttccacctgaatatgcattttctacacatataagccctgtctgtggttcatgtatgtcatctcttctaattgccttttcaacaagttcaggatttagagctccactttcgtcttcatctatagttctaagctgaactccagctattacagcaggtgccccaacctcatgagttacaatgtgataacctttaccaataattatttcttgccctcttaggcaatgagtaaatagagctaattgattcccaaaagttccacttggaaggaaaatagcatcttcttttccaactttagctgctgctaattcttcaagtttatttacagtagggtcatctctaaagattgaatctccaacaggagcctttgccatagcttctctcatttcgtcagtaggcatagtaacagtatcacttcttaaatcgataaatctcattttttcaaccttctttcatatttatatactatagaaccttaaaattgattttttctgtaaagttcatatactttcatagcttatactctacacaataattatactatatttactttatatttaatctactttaaattattaattttaaaaataaagtttcctctctaataagtataaataattatacaatttaaatattaatctctatcgtttaaattccccctagtcacaaagcgtatattatgtgtataattaatttactgactcattttggtcaaagaaaggggtgctataaatggcattagatggattagttatacattcaatagtcgatgaattatcatcaaaacttacaggtggaaaaatagataagatacatcaacctgaagatgatgaggtaatttttaatataagaaataataaagaaaattttagattggttttaagtgcaagtgcctcaaatcctagagtttatcttacaagtaattatcaaaaagaaaaccctctaaaagcgcctatgttttgtatgttacttagaaaatacatacaaggtggaaatatagtagaaatttctcaaataggttttgaaagaataataaaaataagtgttgaatctttagatgaattaaaagaaaagacagttaaaaatattatgattgaaattatgggaagacatagcaacataataataactcatggtgaagaaaataaaattatagattctataaaaagagtcccttttagcataagtagagttcgtcaagttttacctggtcatgattattcattaccaccagaacaaaacaaactcaaccctcttgatgatatatctaaggatttgtttattaaaaacctagaagaattggaaggacctatctttaagtctatatattctaaatttctaggtataagccctattatagctaaagaaatttgctacagagcaggtgtaaatcaaaatgctatcataaaggatatatctgatgaacaatttgattctttacacaaagtattttgtaatttattcaatgatataaattctaacaaatactccccttgcattattatagataaaaaggtggataaggtagttgatttcagttgtataaaccttacattatttagcgatttatcatatataaataaggatagtatgtctcgtattctagaagatttctatagaactaaagatattaaagacagaattaatcaacgttcatctgatttaaagaagagtatatctgttaagcttgatagactttataataaacttaaaaaacaagaagaagaattatcagaatccgaaaatgcagacatttataagataaaaggagaattgattacttcatatatttatatggtagaaaaaggtatggaaagtattgaaattgctaacttctatgatgaaaattgtaatgatgtaacaatagaattaaataaaaacttgacaccatctgaaaatgctcaaaaatactttaaaaagtataacaaaatgaaacatgctaaagtcgagatatctcatcaaatttccttaaataaggaagaaatagattacttagaaaacatagttttaagtattgaaaactgcgaaaatttagctgaattacaagatataaaagaagaacttgctaaggttggatatatcaagactcaaaagaaaaacagtaaaaaggatactatcccatctacaaaacctcatgaatttgtgtcttctgatggatttaaaatattggttggtaaaaacaataagcaaaatgactatcttacactaagacttgctgataatgatgacttatggatgcatacaaagaatattcctggttctcatgtaataataaagtgtgctggtaaggaagtccctgataatactgtatttgaaggagctatgctagcagcattctttagtaagtcaaaactttcttctcaggtgcctgtagactatactaagagaaaaaatgtgaaaaaacctagtggttctaaaccaggtatggttatttatgaaactaacagtactatttatgttactcctgaagaagaaacagtagccaagcttaaggttaaatctgaataaattctgcactaaatacaaaataaatgttagacaagcacacattatcattctaaataaaaatagtggccttcttataaagtacaataataaggccactttctaattagcttacttttaattttctaacaaaatacttttctgttttaataactatacttatattcccaacaaatattttcagtcttcttatatagatgtaattaaaaagttaacactaaaagctattttttaatttagtgatttgttttagtaattcattatattctgattcatacaattctttttttagattatctttttctatagataacatagatataacagttgtaagtctattttctaatactagaagattctcttttttgatttgcttgtctctactaggagtttttttatttctgctaattatatattcgtcataattacaatcaaactcccttattttagcatcttttatctctataatatagttacaaatatgtgatacaaatactctatcatgagacactataagcatagttttatcagtatttatcagtgccttttccagtgcttccatagattttatatctaagtaatttgttggttcatcaaatactaaaaaattattatcttccaatattattttacatagtgctatttttaccttttctccaccactaagtacttttacttttttgtagacatcatcacctttaaacccaaataggcttaagtttatccttataaaagattcatcaaatgaactattaactttagtattgtatagaacactcttttcctcatctaataaactttgattttggtcaaaacaacctacttttaccttgttatttatttttatattgtcatttttatcagccaatatttcttttatcagagtactttttccacacccattatcacctaataatgctatctttttacctctttttatcttaaaggaaacattatctaacaagagcttattttctaactttagagtcatatcttttacctctaatagatttttgctaattatctccataccatcttgaatcttaatgttcatttctttagaaactttaggtttattctttacctcaagtttatcaattctgctttttatagccttcacatttgagtccaactttttcttattagtctgaccacccattttgtgcaacctagcttctgaattacccattctttttggtgtctttcttatgccatcacttaaagcttttttatataaaagagctttttcaagcctttttttctctttaacatattcttgatactcaaaatcagctctttttacttcttcatctttttgcattaaataatcagtgtaattgcctttgtaagcttttagttttccatcttctagttctaatatagttgtacataactcatccagaaaacgtctatcatgagatattaataataatgctccctcatgccttttaaacatatcttccaaaagcccaatgctttttttatctaagtttgaagttggctcatcagctattatgatatttttcttattactcagcgcatctgctatttttaacttaaccttttcccctcctgataagtattcttcaaatttatctggagcatttaaaagactcttctccttactatgactacatgtttcaatattattttcactctgacttatataagaatagctttctgtaaggtaagtatatccttcatcaatttctatttcacccaatattgcttttaataatgttgtttttccttgaccatttgaaccaactagacctattttgtcattttctaatatttcaagtttatctatatccaaaattaatttatctgcataatatttctttaaattctctacttttactaacaacataaaaaatccctccttaacacacttaaatataaggagagattctataaataggcataacaaataaacgtatagactataatctactctccttaatttaagcattgcaaataaagccatcaaaataggcttttcaaaaattacaatactttaaattataaaaaatagattatattctcattgtcctagttaccttgccctttctttcatttatttttaatcattatatcaacattaattacaaatgtctatagaaaattaactaattttagttattcaatatacaatttattctttaaatttattcttcttcaactttaaaatcctgattatttaaaattctgtttaatacaattccaacaattgcagctaaactaagaccagttatctttactgtacttgttatagggattccaatagaaatgcctttattagataaatatgttgttccaagacctattaataatataactgctattattaatatatttatcttactttctacacaagaactgtcccttatagtttttaatcctacataagttatcattgaaaatagcattatactaattccacccataactgaacctggtatactttgaagaaatccaccaaactttcctacacatgcaagcaatatagcaaatattgctgtacgtctaagtattgaagggtcatagtttttagttatagcaagtactgctgtattttctccataagttgtattggctggtcctcctaaacaccctgcaactatagtcgcaaatccatccccaagtaatgttctatttaatcctggattttctataaagtttttacctactacagcaccattagtagtcatatctcctatatgttccataaatacagctaatacaactggagatataatcacaattgctcctaaactgaacttaggaactgtaaagttcggtattgcaaataaacttgcttctgtaatagtagttatatctactaaccttaacagtaaacagattatatacccagaaaaaacggctattaatattcctaattgttttataaatcctctaccaaacttattggttaaaattgctattgctaaagttataaatgctattacaaaattagctgaagccatactaaaagctgttggcaataaatttaatcctataactactatcatagctcctgtaacttgtgcaggaaaatataatttaattttatttacaccaactatttttactataatcgacattataatataaattaatcctgctactattataccaccttgagcatatgctaaatctccaccatacgcctctttagctgctagtataactggtataaacgcaaaacttgaacctaaaaaggcaggtacttttccttccgtacaaaaatgaaatatcaatgtaccaacaccagcacagaaaattgcaactgacggattaaaacctgtcaaaatgggaactaatactgtcgctccaaacatggctaatagatgttgtaaagacattattgtttttttcataaaaacctccaaaattattatatataaataaatcctctgtttaattaatatcttttaattaattatcattccctagattctattttttaacctctatatacttattatataatttatcattattttacattttacgacatcaaaaactcaaataaaggagaataaaaactacattaagactcacatccataaaattataatatttattttgtgcaatctatgtaagctttatcctcctccctgactattcaatgctaagcttttatataatacttaaaactaattattctttgattgtaactgaatcttctccatcaatttctaataaactgacagatataatttcatgtctagaagtaggtacattttttcctacataatctgctcttataggcaactctctatgccctctgtccactagaactgctaattgtattgatttaggtcttcctatatctataatcgcatctagtgaagctctcacagttcttccagtgtataaaacatcatcaaccaaaactactgtcttatcatttacattaaaatctaaataagttcctttaactacaggttcaacatgaattttttccaaatcatctctatataaagttatatcaatatctcctgtatctacttttgttccttctatttgttctattttcttagaaattctatttgcaattggcacacctctagtttttattccaactaaaactagattttctacacctttatttctttcaattatttcatgacttattctagtaattgctcttgctattgccttttcatccattaattgagctttttctaccatatcataattattgtcaaagatataatatatctatttgacaaatctactcctttcttttaattttttataaatttatttttatttaaaatttcaatttaaacaacaaaaaacttctcatcacaagacaagaagctcttatataaaaaatatacagtgtaatttagcaattgtcttacgatatctctgtatcgtttaaagataattttttaatctatcaactcaaattatatatttatatttcaaatttttcaagcttttttaaacaaaatactttaatataagatattttatttaaatttcactaaatttatttacttatataaaaacaaaaaatgatttataagtattatacaaatggttattttatcttcttaatagcttccttaaaatactcaggtaattctgaattaaattcgatatattccttagtggtaggatgtataaatcccaacttcttagcgtgcaaagtttgtccttttaatttaaatttagtttcttttggaccatatacaaaatcacctaaaagtgggtgatttatagacaaagcatgaactcttatttgatgagttctaccagtttcaagcctagctctcatatgtgtaaacttatcaaatctttctacaacttcaaaatgagtaattgcattttttccatcctttactacagccatttttaatctatccttaggatttctccctataggtttatcaacagttattttatcttctttaaccacaccatagcatataaattcatactctctagttatagtatgttcctttaactgttctgctagaaaattatgtgcataattgttcttagctatcataagaagaccagaagtatctttgtctattctatgaactataccaggtctaataactccatttattgacgacaacttatctttacaatgatataaaatcccatttactagtgtattttcatagtttccaggagcgggatgaacaaccatatcctggggtttatttattattaagacatcatcatcttcatatacaatatctattggaatatcttgaggtaaaacctctaatactttaggttctggtatctctataacaatattatcttcctctttaactagatatttagctttttctactttattattgacctttacttttccatcttttataattttttgtatataacttcttgacatatcacctaattgttctgctagataaatatcaagtctaacttcttcttcctcttcaagtactaaaaactcttttacttcatccattatatcacctacttttactttcaaaaaataaaacatatatacataaaaacacagttcctacaactacaaatacatcagctacattgaatacatattcccatataactctaaagtcgaagtaatctaccacaaaacctaatcgtactctatcaattagatttcctaatgcaccagatataattaatataattcccaaccttccaaatatatgtactttccttgtattaagatagtataatccaaatactgttgcaagtaatgcaacaattataaatatccactgattattttgtaataatccaaatgctgcacctctattttcgacataagttaaatgaaatacattatttattattggtattgttgaaacatctaccaaattattcaatacccatattttagacagttggtctaagcctatgagtagaattattattaatatatatagcaatgatttttccccctataaattatttaaaaaccaattttatttgaaacacactattattattatacaaaaaaaatgctctaaagagcaactttattaaaattgtattttcttaataaagctagagcaaaatttaaaatagtaccatcttttttatattgcagattgctacatatttaaaatcatattattatgtataaaaaatttaaaaataacatactaattaatactttttgtgtgttttatagattaaagattaatgatgtctgtactttaaacttacaagcaccactaatcttcaaacaaatatttttacttttgcacttgcttatttttatctaaatgttgtataagttcagatactgttacgaatttatatcctctctcttttaatttaggaattactacttctaaagcttgtatagtttgtgatttatcatttcttttagtgttataatcatgtaaaagtattatattaccattttggacctttgtaagaatagtatttataattgtatctacaccagggttagaccaatctctagggtctaagtttgaccaaagaattatattcatgcctttagaaactataatatcacagacacttttactcatggctctatatggaggtctaaatatctttggttctactcctattacactttttataatattttgtgtatctgttatttctttttcaacactaccataactattttttgcaacatttatatgtgtaaatgtatgattccctatttcatgcccctcatcatattgcctttttaataattctttgttatattctactttttctccaactacaaaaaaagttgcttttacattatttttctttaatatatcaagtatttgtggtgtaaaatcctcatctggaccatcatcaaaagtcaatgctagaatcttttcatcctcatttcctttttttattattacatcttcataatcgtcttttatattgtcatttaaagtataggtttcttttgaactattttgattatgtgtattatggttatatgtatatacacctactatggataataaacatatacatataccccatattgctttcttcatgtcattacctcttttctaattcattctaacaatatatgatgtcaggcttctaatctctcaatgttccatttttatttaaatcagttaaatttgttaggtcttctgaataaaagttagaatcttctacatcaggattttgcattgcatcacctaataaagcattttctttttttgcacaattgttacataaatttgtatcaggtaatatatctaatctttctaaatctatttgattgtgacataaatcacaaaacccatatgttccattttctattttagataatgctgaatctatttgatacagtcttccttcttcatgatttattaaactattttgcatattttgcatatataaatccgttcccatatctccaatatgattgtcataactagataattctcctgatgaatatttttcactagtatgtttagtagtgtctccaaacaaggtattatctttcatatctacgactaaattagttaacttttctctttcttttaataatttatctttgtattttttagtatccattttcaacacctctaattttaatatttatatcataaaaatagtatgtggaaaactaaattaaaaatacaataaaaaacaagatttgattttttcaaaaaaaattgtaggtaaacttaaaattcacctacaaattctttacatatatttttaatataatgtttttagtttttgataataattacattaacttgctaatttatgagcattttgctcttttatatccttagcttttttaaaaaataaaagtccaaggattattgcaactacaatacctattccattagatatattaactggaagtctaaatccttcttttgcctgcattatataactaaatgttactacagtcataaaaagtgctggcaatgtagttatgtaatgatttttatttgctttgactaaatatgcagaaccagtccacaacattatcatagcaagtgtttgatttgcccaagagaaatatctccaaattatattaaaatctataaatgtaagggcaacccctacagcaaataatggcaaagctattaaaaatctatttttaactgcatcttgattataattcattgcatcagctattgttaatctagcacttctaaatgctgtatcccctgaagttataggacatgctacaacaccaagtatggccaaagcgcctccaataggtcccattaatccaacagatactgtatttacaacagttgctgctccaccatcattaaatattacattaagctgaggtataccatggaaatatgacatagctgctgctgcccaaactaaagctattataccttctgcaaccattgacccataaaatactggtcttgcctcactctctttctcaacacatctcgccataagtggtgattgagttgcatggaaacctgatattgctccacatgctattgttataaataagtatgggaataaaggtgttccatttggattcatattttgtaaatttatatttggtatgttatacccctttattattaatcctccagctacacctactgccataattaataatgctgctccaaataaaggatatattttaccaatcaatttatctattggtaaaacagtagccataatataataaagtattatcactccaacccatatttgtgcgtttacacctgtcaatgtctttaataatcctgctggacctgttacaaatacaactccaaccaatactaaaagaataacactaaatattctcattgctatttttgcaccatttcctagataaagacctaccaactctgatgcagatgtacctttgttcttcattgataaatatcctgaagcaaaatcgtgtactccacctgcaaagattgttccaaacacaatccacaaaaatgctgatggtccaaataacgccccttgtatagctccaaatatcggacctaaccctgctatatttagaaactgaattaaaaagattctcttccatttcattggcacataatctactccatccctacaagctatagctggagtttggtttttgtcattgattccaaaaaccttttctacaaaagtaccatagataaaataacctactataagtactactattgaacctaaaaagcttaccataaattcatccccttagtttttatataattgctttataaatttttatgagtttaagaaaactatttccagttcaaatagtaatacttttttatgctaatataaatattaattacattaagtgcatatttaagtacatgaaatgactttatatatgcattaacagcctaaattcttttactttgcttctgcttacagttacttcatagtcactattttttaatttcaatatgtatgtattgttaaaccatggtataatttcttttactttggttaaatttacgatataagacctatgtgttctaaaaaatgttttatcatttataagattctctacttctgatatgccttcttttaatataaacttttctttctcagtatatataaatgtctgcctttcattagcttcacaataatatatatcatcaatatctattacaaccaatttatcacctttccaaaggctaattttatgtgttatttcttctatctcctgatttactgtctcttttttatatttatataaattactattgctattagacagttcaatatcactcatctcacttttttctaatttattcaacatagaaataattctctcttcagaatatggcttcagtacataatcaaatacatctaaagaaaaagcatctactgcataattttcatacgctgttataaaaacaattttaggccttgatttaaactgatttaatgtttttgcaagaagcattccatcgagatgaggtatatttatatccaaaaaaattacatctattttattttcctgaataaagtctaacacttctataccattagtaaattcatttactacctctatgctacttttattctcaataaaatatcttaattcctttcttgccggaaattcatcttccactattatagctctcatacttctactcctttacataaaatactatcaaagtcccattgtctgttcttcttatattaagccctcttccatacatcagtttaagccttaaatgtacattataaagtccaatcttattttctggcatattatcttgatatacattatttataatttcctcacttatacctataccattatcctctattgatattctcacagtattttctaatgaataaggtaacttttttatggatattttcactacaccagctctaccactttctaaaataccatgtattatcgcattttccactaatggttgtataatcaaacttggaatctttatatttacatcttctatatcataagatacagttagtaattctccaaacctagctttttctatctctacaaaagatttaacttgttcaatctctttatttatatcaattaagttatcactatattcaagattatatcttagataagttgataaatttattattaactctctagccttatctggactaaatcttataaatgaagctattgtgtttagggaattaaacaaaaaatgcggattaatttgtctttgaagtgcttttatttctgctttatttctcgcttctatatcttttttatctttctcaatcccctctactatagatataacaaatcctattccaatctgtccaacaattaaaggtaaatatatcccaacaattatttgaattgctaaagaatgtggatatgatattaagtatataagtagtatagtaaaactttcagaaatcatacctaccaatataccatacattactctatgttgctttggtatcctcttatatagaaatcctgataatacacctgctagtatacttgataaaagacatggaacagatgttatccccccaatatccataaaatatctatgaatccctgaaaaaactcctgctgtaatacctaccattggaccaaataaaatgccacctgatactatagatattattctagtgtttactattgaccccatataatttataccactataagttccaaatatggctaaaaaagtaaaaactaatgctatacagaccaagtcattaaaactatattcttccttttgaaatatctgcttaaatatttttaactttgttattagaagaaacagtactacaatgaggcttgtcttttctattaatgcgattaaaattgatgttttcatattccacctttaaaaaataaatttttacacactctaaatttattatgtttgttgtaacttatatatttgaagtaatcctatctcgacattttccacatttaaccttttaattaaataaaaaatggatatacttctattaacaactaatactagctgactaacacaagcttgtaataacttgtagttatcattaactctacaattctagtatttaattttatactttagaaatctcttttcttagaagtaatactttcgaatattatataatacaatgttatgtagattcttactcatacaacatatttctttaaaaattttatactattctttgttcaaatatctcatttgatttaattgtgctaaacacacattatcatctctctgttatatatttattatatagccgtatatcgataaagtaaataaatcctatatttaaaatcatatgtttgatagtaaatcattataatgtatatttaccataataatttgccaaccttgaaagtcacttctataattagaagttaaataattcttctaaaaaaaatacctctaaattttattttctgaaatacatagttataactatttttatcacgtataagaataaaaattccagaaaatttttattatctaagttaatataaaacatattatttaatataaataaattttttataataatatattgatttaatttactttattattgtaaactataagtataagatatactatataaacaagcataaatataccttaattctaactatccttaattttatttatctcctagtgttattttacgtattttttataaaatacttttagtttttttacttttgaattttttataggagggtatttagtggatatattaatttttgataacgatgttataagattatattataatgcaaatttgttattaaaagaacttactgaaaaaaataaagtaaaaatatattttatagttgtagatgcaaaatacaagataagtaatgaattatgtgatggattatggatagcacaaaaaattagagaatcagattatattagtccaatcatatttcttacaaatcatatagaaatgattttagggatcttcgattataggttagaagttatggactttatattaaaacatgatatggaaattgctgaaagtaaaataaaagcttgtattaaaattgctcataaaagatacgttaaagaaaaaaattatcgctctaatttttttactatctactcagattcctcactatggaaaatttcatttgatgaagttatatattttgaaacaagcgctattccacataaaataaaattagtgactacttcaagaatatttgaattctataaaagtttaaggtctttatcagatttagatgcatgctttattcgtgtacataaatcttttgtagttaataaatatcatattgtttctctcgacctaaagaaaaataatattaaaatgagtaatggccatatatgtcgtatatctaatacatatagaaatattttaaagaacattattaaaacataataaatagaaaaaagagatgtctcaagataagaatttgaaccatctctttttttatacaaaaaaagtagttcctaagaatcctctatataataatcgttttgtgaaaaaacacataatgactatatcatatacaatttctattagacattgcaaccattgttcctagattatgattcaacaagatagctcattaaatcataaaagtatgaaatagtctctttaaaatattcagttgttattttgtactgacatatcatataaatacatatttttatgatatatagttacatattttatgaaatttatataaaaaattcttatttagattatataatctaaataaattaaagttcaagagttaattaaactaatattgggagggagaataaatgaaaaaatttaggaaacataaaaggattagtaattgtatatctatattgttgatattatatctaactttaggtggtttgttacctaataacatttatgcacaagacttacaaagctatagtgaaaaagtttgcaatactacttacaaggctcctatagaaagaccagaagattttcttaaagataaagaaaaggctaaagaatgggaaagaaaagaagcagaaagaatagagcaaaaacttgaaagatctgaaaaagaagcattagaatcatataaaaaagattctgtagaaataagtaaatattctcagacaagaaattatttttatgattatcaaatagaagcaaattctcgagaaaaagaatataaagaacttcgaaatgctatatcaaaaaataaaatagataaacctatgtatgtctattattttgaatctccagaaaaatttgcatttaataaagtaataagaacagaaaatcaaaacgaaatttcattagaaaaatttaatgagtttaaagaaactatacaaaacaaattatttaagcaagatggatttaaagatatttctttatatgaacctggaaaaggtgatgaaaaacctacaccattacttatgcacttaaaattacctagaaatactggtatgttaccatatacaaatactaacaatgtaagtacattaatagagcaaggatatagtataaaaatagataaaattgttcgtatagttatagatgggaagcactatattaaagcagaagcatctgttgtaagtagtcttgattttaaagatgatgtaagtaagggggattcttggggtaaagcaaattataatgattggagtaataaattaacacctaatgaacttgctgatgtaaatgattatatgcgtggaggatatactgcaattaataattatttaatatcaaatggtccagtaaataatcctaacccagaattagattctaaaatcacaaacattgaaaatgcattaaaacgtgaacctattccaactaatttaactgtatatagaagatctggtcctcaagaatttggtttaactcttacttcccctgaatatgattttaacaaactagaaaatatagatgcttttaaatcaaaatgggaaggacaagcactgtcttatccaaactttattagtactagtattggtagtgtgaatatgagtgcatttgctaaaagaaaaatagtactacgtataactatacctaaaggttctcctggagcttatctatcagctattccaggttatgcaggtgaatatgaagtgcttttaaatcatggaagcaaatttaaaatcaataaaattgattcttacaaagatggtactataacaaaattaattgttgatgcaacattgataccttaatattttttcacataaataatttaatatttttcaaatttaaggaggagaaacaatgaaaatacaaatgaggaataaaaaggtattaagttttttaacacttacagctatagttagtcaagcactagtatatcctgtatatgctcaaactagtacaagtaatcattctaataagaaaaaagaaattgtaaatgaagatatactcccaaacaatggattaatgggatattatttcacagatgagcactttaaagatttaaaattaatggcacccataaaagatggtaatttaaaatttgaagaaaagaaagtagataaacttctggataaagacaaatcagatgtaaaatctatacgatggacaggaagaataattccttctaaggatggtgaatatacattatcaactgatagagatgatgtcttaatgcaagtaaatactgagagtactatatcaaatacacttaaagttaatatgaaaaagggtaaagaatataaagttagaatagagctacaagataaaaatttaggttcaatagataatttatcatcacctaatctttattgggaattagatggtatgaagaaaattataccagaagaaaatttattcttaagagattattctaatatagaaaaagatgatccatttatcccaaataacaatttctttgacccaaagttgatgtctgattgggaagacgaagatttggatacagataatgataatataccagattcatatgaacgaaatggatatactattaaggacttaattgcagttaagtgggaagatagttttgcagaacaaggctataagaaatatgtatcaaattatttagagtcaaatactgctggagatccatatacagattatgaaaaagcttcaggttcttttgacaaggctataaagactgaagcaagagatccgttagttgcagcatatccaattgttggagtaggtatggaaaaattaattatatctacaaatgaacatgcctctactgatcaaggtaaaactgtttccagagctactactaacagtaaaactgaatctaatacagctggtgtgtctgttaatgtaggatatcaaaatggattcacagctaatgtaactacaaattattcccatacaacagataattcaactgctgttcaagatagtaatggagaatcatggaatactggattaagtataaacaaaggagaatctgcatatataaatgcaaatgttagatattacaacacaggtactgcacctatgtacaaagtgacaccaacaacaaatttagtgttagatggagatacattatcaactatcaaagcacaagaaaatcaaattggcaataatctatctcctggagatacttatcccaaaaaagggctttcacctctagctcttaacacaatggatcaatttagctctagactgattcctataaattatgatcaattaaaaaaattagatgctggaaagcaaattaaattagaaacaacacaagtaagtggaaattttggtacaaaaaatagttctggacaaatagtaacagaaggaaatagttggtcagactatataagtcaaattgacagtatttctgcatctattatattagatacagagaatgaatcttacgaaagaagagttactgctaaaaatttacaggatccagaagataaaacacctgaacttacaattggagaagcaattgaaaaagcttttggcgctactaaaaaagatggtttgttatattttaatgatataccaatagatgaaagttgtgttgaactcatatttgatgataatacagccaataagattaaagatagtttaaaaactttgtctgataaaaagatatataatgttaaacttgaaagaggaatgaatatacttataaaaacaccaacttactttactaattttgatgattataataattaccctagtacatggagtaatgtcaatactacgaatcaagatggtttacaaggctcagcaaataaattaaatggtgagacgaagattaaaatccctatgtctgagctaaaaccttataaacgttatgtttttagtggatattcaaaggatcctttaacatctaattcaataattgtaaagataaaagcaaaagaagagaaaacggattatttggtaccagaacaaggatatacaaaatttagttatgaatttgaaactactgaaaaagattcttctaatatagagataacattaattggtagtggtacaacatacttagataacttatctattacagagctaaatagtactcctgaaatacttgatgaaccagaagttaaaattccaactgaccaagaaataatggatgcacataaaatatattttgcagatttaaattttaatccaagtacaggaaatacttatataaatggtatgtattttgcaccaacacaaactaataaagaagctctcgattatatccaaaaatatagagttgaagctactttacaatattctggatttaaagatattggaactaaagataaagaaatgcgtaattatttaggagatccaaatcagcctaaaactaattatgttaatcttaggagttattttacaggtggagaaaatattatgacatacaagaaattaagaatatatgcaattactccagacgatagagagttattagttcttagtgttgattagtatcaaatgatttaaatttgtccccacaatacaatatatatttaccttataaagtactaaaaaattaactttataaggtattttttatttaaatattctcttcttctaacatattcttttttagaactatattgtattataaagataattatctgtatcatatcacctatatataaacataaattcatttaattatataaatttaaaaaatatttttttgatatattattgacaatttccattataagagttaaaattaactcataaattacatattgggtataaaatacaatgtatgttagaagttgtttcagaaggctatggttttctgatttttttatgctcagtagtgatatgcaaaaaagacaaagttgacatcagttaacttttacctttattctactttccccaaagtaagaataatctaacccctttgagatgagcaaaagctcatctttttttattatcaaaagatgctgtctcaaaatagagataatcctctttttcattgttgaagtgattaaaatatattttatttcatacaaaaaagagtgtctcatgaacaaaagttcactttgagactctctctttcatatcatatacctttttaataactttaaaatttatttatcaagtaaagatagctaataattagtatcttctctctataaatccaacttttttataaacttttctaagagtttttctagcttgtttttcggctttttctgctcccatactatatattttttctaaataatctttattattaagaaggtcaacatatttttctcttataggtcttaaagcttctgatactacttcagccacatcttctttaaatatgccataaccctttccttcatacatgtttacaatctcttctacactctttttacttaaattagaatatatatcaattagatttttaatacctggttgttcatcattgtattttacaacacctaaagaatcagtaacacttctttttatctttctctttatagaatctgaatcatctgctaatagtataaatgcattttcatttgaatcggatttactcatttttttagttggctcttgcaaactcatcactcttgctccaccttttgggtagtatccttctggaactacaaaagtaggtgaaaatctattattaaacctatttgctaaatcacgagctaattctaaatgttgtttttggtcatctccaactggaactaggtcagtttgatacaacaatatgtcagcggccataagaactggatatgtgaataaacctgcatttagatttgcttcactcttttgtgatttatctttgaattgagtcattctacttaattcacccatataagtcatagtattcaatacccacataagttcaacatgctctttgacatgtgattgtataaatatagtatttttttctgggtctaatccacaagctatatattgagcaagtaattctatagcattcgctcttaaaactttagggtcctgaggtactgttattgcatgtaaatcaactatactataatagcaatcataattatcttgaagttcagtccagttttttatagctcctaaataatttcctaaagtcattttgcctgatggctgtgctccactaaatataacttttttttcactcatttttttgtacctccttatatatttatattgattttaacatatttaaaactatgtctttagagttattggcagcatcatgtacaaatacatcataagtaacatcagcacttccatctgccttatcagacattgctcttattattacgaatggagtattatttaaatagcatacatgagctatagctccaccttccatttctccacaatatccaccaaaatcatttactaattcttcttttaattctttagaatttataaatttatctcctgtaactactcttccttttaatactttatgagtctttacttcttccacagaagatttgtaagcagcatctataagtctttcatctgctttaaatacagaagtcttcattcttggtataactcccttagggtctccaaatgctgtagtatctacatcatactgtatagcatcagttgatattactatatcattaacatcaagtttttcatttaaagctcctgcaacacctgtattaacaatagcatcaaccttaaattcgcttattagtatctgggcacaaagagcagagttaaccttacctataccacactttactaacactacattcttacctttcaaaattcccttataaaattctaagctagctttttttatagtctctctaatatccattaaatcaactaaaatactaacttcttcatccattgcacctataattcctattacgttcatttttcctcctaaattttctatattaaaaaatccgtcctaaatcaataggacggatatattttccgtggtaccacctaaatttatatacactcaaaactgaatatatatatcttaatatatgctataacgtgcatacacgatatcaaatactctgtaatcttaaattacatttcattttactcctcaaagacccattcaataaatactttttattaagttctcagcatccttaattctctgtgcaaaaatatatttatttactatttcttatctcaggatttaatttattaatttctttattttataatattccttacactataaattgtcaactatatattataatatccaaaagaaatttttaaaatacattttatttagctgttttcttttcatatctattccataaccatagaccagataatataactagaagacctccaccaatcatctctatctcatatataacattttcagcaaatgtcggcataactggtgctgcagataataatataccaactacagttacaactaaaaccatttttgctaaacctaggcaagtacttgttgattttgccatagtataaggtctaatttcatctggtctctcttttcttagtttaatataagaagcatataataatacatatgggaataatgcagttaatgctgtcatagttacaagaacattgtatatagcatcaacagaaggcattaatgtagtcaccaatagtattatagtaactattattgcttgaagtataactgctttagaaggtatcttgtgttcatttacctctaccaaactatctggaaatattccttttttaacactaccaaataacatttttattggtgatgctatataaagaactattgctcctaatactgagaaagctataccaaaagctattaattgaaccaaccaagaaccaattcctaaagacgtacaaacagcagaaagtgcatctaatacacctttagaagcagtaatttggtctggtggtattatcattgttattgcaattgaacctaatacatataatgaagctactattccagctgatattaatattgccttagggaagttcttttcaggcttatctatttctgttatgaagttagcagcagtctctgctcctgctaaaccaaacattatagctgatatagcaacaaatgcatccatattaagttttggagtcattgaagctattgtatatgtagaagctatatcatgttttttcaacataaatactgctacaaatgaaaatattataagtatagcacttggtattgttgaacctaatgcacctgtattagtaaatatttttgtaaaacttattcctttagttgctataagagataatgcccagaatattattaaagataatataagtacaaacatcttattatcagcaagagctggatttcctattgtataagaaacatttactgctaagaaagttaaaaatgaagaataccaaaatattttagctgtccagtttaaccaagaaactaaaaatccatacttttctccaaaggcttccttaacccaatcgtaaagacctccatcacccttttgatatgtagaagctaattcagcgcaaattaaagctcctggtacaaagtatataaatgagaataataaccacataggtattgcacctaatcctaaaccaaagcttgatgctgtagacttagctatccatcttataccatataaagctgatacattcataaataccaaactccataggcctatttttttcttttccatcctaatttcatttcccctctctattaattattttaaatttaatttcaaaattaataaaatagattcattattattaaactgatatttttcaaaatatttgcatattcaaaaacagttttaataataaaccttaaatactttgaaatcaaatcttattaaaaatgataaatttaaaagttttaccactttaattctaatgatactaaatttttaaaattgtttcaatattattttattataaaattttatttattatttttcattagtatataaaaagataaaatacataactttatagacttaatttattacttttatagaattttcacaataaaaagtcattttacttccgtatttaatgcaaaagtagagattaaacttaatataaaaaatatataacaaactttttttatatttctagaagaaaagtatactcttttttgtttaataatgctaaaattgatttgtattgaattttgattaggaggaaattattatgaaagctcaaagattaaatgctgtacttgaacaaatgaaaaaagatgatatttctcaaatgttagtaagtgaccctacttctatattttatcttacaggagtactaatccatccaggtgaaagattattagcattatacttaaatttaaatggcaataataaattatttataaatgaattattcccagtttcagaagatttaggtgttgaaatggtttggtttaatgatactcaaaatccagtagaaataataactgaacatatagacaaaaatgctactatgggtgttgataaaaactggccagctagattcttattaaacttaatagaattaggtggaggaagtaagtttgtaaattcatcttatataatagatactttaagaatgtgtaaagatgaagaagaaaaagagttaatgagaatagcttcaaaattaaatgacaaggctatggaacaacttaaagctactgtttctggtgaacttacagagaaacaacttgttggtaaattatctaaaatatatgaagacctaggtactgatggattttcatttgaccctattataggttttggacctaatggagctaatccacatggtgaacctggaaatgcacttgtgaaaccaggagatgcaataatattagatataggttgtataaaagataactattgtgctgatatgacaagaactgtattctataaagaaatacctgaaaaaggtagagaaatatttgaaatagttcttgaagctaataagagagctgaagctattgtaaaaccaggtgttagattctgtgatatagatgctgctgctcgtgactacataactgaaaagggatatggacagtacttcactcatagaactggtcactctataggacttgaagttcatgataaaggagatgtatcttctataaatacagatactgtacaaccaggaatgatattctctatagagccaggtatatatttaccaggtgagttcggagttagaatagaagatttagtacttgttactgaagatggttgtgagatattaaacaaacatgacaaagaaatatgtgtagttggttaattctaaaatcaatttgataaaattaaaaagccatataaaaatgttttaaacatttttatatggctttaatttctcaatctatgatttatttcaatccattatttatattgcagttattaagattgcaccctttgaagtatatgtccccatcactgaaccaatttcacagattacaacatctttgtattttacatccttttccataacttcccttaccttttgagccttttctgggcaattagcatgtcctataaataaaaccttttcttctttatctttaatttttgactctactaaagtaatcagctttttcaaactgtttccttcacctcttgccttatctataggagttacaacgccatctgcaacttgtattatcgccttaaaattcaaggtatttataatttttcctgctattggatttattctaccacccttaatagcattttctaaagtttcaagtgttccaaaaaatggaggattatctttatatttatttattattgaaacaatctcttcaatttcttttccttcttttattaatattgctgcttttaacactaattgtcctattccaattgacccactaagtgaatctataacctcaacttttttgttatttccttccttttcaaacatatcttttgctaaaagtgcactattataagtcccagataatcctgaacttatattaatcaccaatacactttcttcctgacaatggtatgcttctaaaaatttatcaggagaaggacatgatgtttttggtagtactttactctcactcatttttctatagaaagtttcattatctatttcctttccagatatataactttcttctccaaaagatacatttaaaccaacaacttctatgttgtatttttctattatatcatcaggtaagtcacatgcactgtccactatcaattttattttatccatattaacctcactataagatattattttatttattcagtcggtcgtacgaccgatttaattattattttatatattgaatgaaaaaaagtcaatagatatagattctcgctttattgacaataaatattcataagcttataatgttattaatttgttataaatatacatggaaaggtaggttttatgaaaacaaataatatgaaacaggctattttatcatctgcaaccaatttaatagccaaaaatggagttcaaaatactagccttgctgatattgcaaaagatgtaaatataagtaaaggtactttgtattatcactacgcatctaaagatgatattatatatgatattgcggatactcatttagaagttataactagtgctatactaaactgtgtaaaaaatgtcaaatcaaaaaattctcaaatagaaatggttaacttaatcttagagaaaatatctactatagaaagtcgtggtagggtacatatgtatcttatttgtgaggcaattacttcaaataatgatttaaaggaaagaataagattaaaatatattgaatggagaactactcttaaatctgaaattgttgaatcactagaaaaatataatagtagcgaaaatgaacaggatgctgaatcattttcttttttactcatgtcaatagttgatggtttagttgtccaaagtttattaaaaacagaaaaaataccttatgaaaatatagcttcttttttagttaatcattggatttaaacttaatacttagataattaataaaagtgaactatttaagttatctactttaacagttcactttcttatttattctcaataatttttacttaaaacattcaatttttatttaaaccttcatggaatcacaaaataaaaatctcttataaatttaaaatgtttttatttatgttcatgtgtatgcccatctgaatgttcatgaccatgtgtatgtgtatgctcatggctatgctcatgagtacctgaaaaaccatcatcatgattatggtcgtgacctacaccatttacatgctcatgttcatgcccatgactgtgagaatgttgatgtgaatgttcatggttatctcctccacagcatccttctcctccagtcccacaacacccacttgtatgtggattatgatgatttcttactacaaatctctctcttaacataattcttatacctcctagtatattattgagtacttcatgtaccccattaactacagtatacatctaactaggtataatctcaatacatatggcattttttaacatatataattaacatatataatcttaaagaaatttatccttaaaacctccaccttttacttcttcaacgttattgacagaaataaaagcttcactatccatatcataaattaaatctttaaatttacctatttcatttgcagatattatgcaataaatcatctttttcttattttgtgtatatgcaccttctgcctccaaaaaagtgactcctctacccattttattcattatcactttggatatttcatcatatttatttgatattaaaagtatagatttttttctatcaaagcaatcttttcctatatccatagtaaaagaaattatatacattgtaattaaagtgtacatcaccaatttagctccaaataagaaagctcctgcacatactacaaaaaaattaataaataaaaatgtatttttcataggtatatcatactttcttttcattatggctgctattatatcaagtcctccagcagtagctcttgctttaaaagttaaccccatacctataccagttaatgcaccaccataaatacactgtagcatagtatcatctattgggaaatatttagcaatatcttgtgttagccccagtgctagagaaaacagtaacatattgacaaaacttattagcaaaaatttattatcaaaatactttctagctataataaatattggtatgttcatcaagaaacttgatattccctgatttataccaaataatttgtataatataacacaaattccagctactcctccacttaataacttggctggtgctagatataaatttattcctaaggttgatagaatcatacccaatataatcagaccatattgtaaaaatatgttattctgaacctcccatgactaaagtcacagggttcctgcttcatagaattttgcatactaaaatatgtcttactaattctccacaagctatccccgtagttcctacggttcttacataagttatttattttgaattgttattagtcttaatccttcttttaatatatttatgcttgcatttatatctctatcgtgagtttcattacaactaggacaaatccattctcttatatttaaatccttaacttcctcgtttttatacccacatttattgcatatttgtgaacttgcaaagaatttacctacctttacaatttgtctaccataccaattagccttgtattctaattgacgaacaaattctgaccatgacacatcagaaattaagcgagatagtttacgatttctaatcatattctttacttgtaaatcttctatgcaaataatatcattctcttttattaatttagtagatagtttttgtagaaaatcctttctttgattggctatatgttcttgaagtctcgcaacttttaatcttgctttatttctatttaaactatcgattgtttttctcgataattctctttgtaatttagcaagtttgtttaatgacttcttaagatacttaggattttctataaagtctccacaacttgagatacaaaattctttaattcctaaatctaaacctatctgattattagtattttcaaatacttcaatatctacatcagtacagcataatgatacataatatctaccacttggttctttagatatagtagcattaagtattctaccttgaggtacttgtttatcccttatcttaaccataccaagtttaggtagttttatatattgaccacaatacataatgtttccatttgtaaagttagttttatatgaaaatctattaattttctttgatttaaatttaggaaatcctgctttttctttaaagaattttttatatgcattatctaaatcttttaaggcgttttgtagtgaaaatttgtcaggttctttaagccattttaattctttttttaaattggtcaaatcagaactacactgtttataagtaaaagtttctttatcgtttttataaacttctattcttttagcaagatacttattatatacaaatctacaacatccaaaagttttgttaattaactcttgttgttttttatttggatacattctaaacttatatgccttttccactactatcacctcactctaattgttttttgatacacattttaatgattttatcatatttaatatattatataatgctgtgatgaacaatttattaatcacctatcataatattaacaaatgtaattatttaaaacaattatttagaaggttttatatttaattttaaataacatatttaagaaccgtaagtcttaacttttatcatttttgaggttgtcgttcacataagttcgctactacctatgcagttctcttatgaacttcttacactttcacgtaagcacagactatatcttatccttcggcattatccgttaaggtctacccacttccactaccaatagcttgtagtgtacttccctcaagaggaatagtcgttgaagtttctcctattcggagtttacctgctgattgcccattttaaagtacttagggtttaaccttataccatctaaccaattttttctactttcgtaactttcacacttaggtttatttcatccttatgttttagtttggttagctttaggggtttccagcaattcaagtagtattggataggttctatcctatctctacatataggtttccctatatgctgactattttagctactaactcatgactaaattcacgagtgtgcgtagctattttttaatcaatacttaactttttgttttcaccatacatcaaaacgcacccctttgcataataaataaaccaccctgcagaacacacgataaatttataaataaatttatcagaagtagcttactaaaaatattattcatcctcacttaaacgtttattcattaatattctatcacatgacataaataatttatatgatttatatagatttatttattgtaaattttggaatattaaaacattttattgaatagataattatattacataaaaaatccctatagaaatctataaactaatttctatagggattttggttaactaactattctttttatttttttataacttttatacctgtcatatggtcatttaagttttgttcctctaaagatttatcatctactctgtttatttctaaagctaaagtttcagacttgatatattcattaaaatggtcaacagccttagcaatttcatcatcaccacagtattctattactatattatctaatacttcaaagttattagattttcttaattgctgtactttagatataaattctctagcataaccttcattaatcaactcttcagttagcttagtatctagtataacaaaaagattgttttcaacagatacattaaatccttccttagcagttatacctattaatactaaatccttattaaattcaaaagcttcgccatctaaatcaactgttaaagtctcacctttttcaagtttattagcagtttcatgagcatttaatttacttaatgctccaacgaataaattcatcttagaacctaataatggccctgcttccttaaagtttggttttaaactaaagttcatatactcatctaaatccttagcaaatattacctctttaacattaagctcttcttttattaaatcaactacatcacttattgtatcttcaaacttaccatctactaacactttttgtaatggttgacgaacttttattctttctacttctcttgaagctctacctaaagtaactaagtttttagctaaatccattttttcttctaatttagtatctactaactcttcattacatttaggatattcagctaaatgaacagatacttctcctgttaagtttctatacatttcttctgacatatatggtgcaaatggagctatagctctacaaagaccatgtaacaattcataagttgtattgtacactgcttttttatcttctgttaattcagttgcccagaatcttcttcttgaacgtcttatataccagttagataaatcatcatttataaaatcttgtatcatccttaaagttttatttaactcaaatatagctaaattttcttctacatctttcattaaattattgaacttagataatatccatctatcaagttctggtctatctttatattctacaaaaaattcagttggatttatatcatctgtgtttgcatataaagtaaagaagttatatacattcttcatagtacctataaatttactttggatttcttttaatccatccatatcaaatttagttggagtccatggtggagaaacatatagtaaataccatcttaatgcatctgctccatattggtcaaacaattccattggatttactgtatttcctcttgatttactcattttcttaccatctttatcaagtacaaggtctggaactaaaacactcttatatggtgcttttcctaatacaaatgttgatactgcaagtaatgagtagaaccaacctctagtctggtctataccttctgatatatagtcagctgggaacaattggtcaaaattttccttattttcaaatggatagtggtgttgagcaaatggcatagccccactatcaaaccaacagtctataacctctgttactcttgtcattggttttccacatttttcacattttaagtgtatatcatctacatatggtctatgaagttcaactgtttctggatttacatcttctatagctttttcagctaattcagctcttgaaccaactgaatctgtatgaccacattcacatctccatataggaagtggagttccccaatatctagttcttgatattgcccagtcatttagattttctaaccagtttccaaatctcttctctcctacaaaacttgggaaccattttacaccattattattttctattaatttatctttaagtttagtcatctctatataccagcttggttttgcatagtatactaatggagtttgacatctccagcagtgtgggtaattatgaactactttttctttgctatataatttattttcagaagctagccattttattatttcaacatctagcccatcttccattacaaatctaccttcccaaggagtagatgtaaatttaccagtttcatctactggttgaataactggtaaatcatatcttttacctgtgttgtagtcatcttcaccaaatgctggtgctgtatgaactataccagttccatcttcagtagttacataatctcctactgtaataaaaaatgcttttttgtcaacttctacaaaaggcattaattgttcatattctaaaccttctaggtctttacctttcatttcttctaaaacttcataatcttcacctagtactttatcagctaaaggtttagatacataatatacctcatcaccttttttaacttttaaataatctacatcagcatttactgttaatgaaacatttgatggtaaagtccatggagttgttgtccatgctaagaagtattcatcagcatcttttttcttaaatttagctataactgtattagtttttacttctttatatccttgtgcaacctcatgactagcaagaccagttccacatcttgggcaataaggaagtattttatgcccttcatatatatatccttctttgttgaatttgtttagtatccaccatacagactctatatagttattatctaaagttatatatggattatctaaatcaacttcataagccattctctcagtcattattctccattgtttttcaaatgagaaaactgactctctacatttttggttaaattcagctattccatattcttctatttgttgcttgctagtaagacctaactctttctctacttgtatttcaactggtaatccatgtgtatcccaaccagcttttctctttacttgataaccagacattgttttatatctacaaactgaatctttaagcgttctagataaaacatggtgtactccaggatttccattagctgttggaggtccttcatagaatacgaaacttgggtcatctttccctttttctaaagttttttcaagtatatttatgtctttccaataatcaaaaacttgtgcttctgcttgttttacagaactgtctaccaatggcttaaatttcgccatgtaaatcaccctttcctactaaatattataattccaaaattttttattctttcacataaatttaaatactaaaaaactcgccccctttaaaccaaagggacgagttataaatcgcgttaccaccctaattctatatgtaaactaaatactagctacatataacactctaatagtataacggtactaaccggcacagcttagtagaatttaatcgttcagcctgcagctcaagagtgatttttatctttataaattcattggttctcagcatacccaattctctgtaaaattatctaaagataaatgtctctatcaacgcttttaaaaatttatctgtgtttatatgaaattttataacaaataatttgaatagtcaatatatttttgaaaaatataataatttctatttttcttacatttttatcctatttttaatctttgttatagatttctcaaactcacacagttattctacataaaaaataaacaaattacaagcttattctaaagttgtagcagcttcatcattactataattatacactgttgttccttcaaatgcatttacacatttttcatctacatcataaaaaatctcatcaacacttcttatttcatcttctaacagtgatttaaatttatttctaaatatcttaaattctttgactaaagcatcatactcttttcttatctctatgacacggttattagcttgttctataatttgtctagcttttaaatcagcttcttcaacaattatcttagcctttttattagccgcgctacaagtgtcttctgctgcactttgagcagttattaaagtagcttttagtgtttcttcaatattttcatacttgtttacttggtcttgatataaccctaatttttctttaagagctgtattttccctacatagagattcataatcttccttgatgatatctaaaaattcatcaacctcttcatctctataccctcttaaaccttttttaaactctttattttctatctcaattggagttagcattacatttcctcccagctataatttaaattagtccttatacaattaatcttgcttgaacttttatttttccttttttggtaatatctcctatttgtgttaccttagctcttcctttgcctctaatagaaatcaaatcatcattttttactattttagaagttgaagttatcttttcataattgacatggactttttctccatttatgtattttgcactatcttgtctagatatattgtaaataccacttatcacacaatctaacctatctgaagatactgtaaatgatacttctttatattttgaagaactattaacaatattttctctggaaatttcctttacaattacattatttcttgaaaccttttctaagtttacaattataaaatcgcaaatatcactacttacaactacttgacaaaagctatcatgtataattatatctccaattttttctctttttatacctagacccagtattgaccctaagtaatctttatgagatatatttttaaacttgaaattcccttctatttgtaaaaatctaagagtatcttctatatcttcatattccatgtaaaatggataaataaatacagtgcttctttcagcttgttcataacctccatccacactgtattttatttcatttgtagaatttaatattgctacagcatttttcacttcatatggattaagaaactccgtagacttaacatcatagttttttatacaactattagccttgtctatcactttaaacattttatttttcaagtctatatcctttatgtgatttgttagttttaatttatccatcctatcaccttagaatataaccaatactaattgtcttaggaacatcaataatactattgcaattaaaggagaaaaatctataggtccatttgtatatttatacattatagaccttattggcccttctattggctctgtaagattttccaaaatattaaaaattttactttgtcttccatttggaaaccaagtcatcaagctttttataactatcatccatgctattatatctaaaagataataaagtgcaattcttattgttcccatatattaaccgcctttttactatttattttgccaagggaagaatgctttactttctaattcttttttcatatttgcatctatatccacattattaggagctagtataaatattgatttagaaaccttttgtatacttccatctaatacataaactgccccattcataaagttaaatatagatttacgaacttcagaattagtcaatccttccaaattcactataactgcccttctttgttttagatggtctgctatagttgcagcttcatcataaaccttaggttcaactattacaactttcatttggctagttgtatgtaaatttacaattttatttgcttttgcagtactaaagccactgttcatttcttcttcttgaactatatcgtccatgccactttcatattcatcttcaatataatcttcttcttcatcaactatccaattcttaaatttagatattattccatttgacattattaacttcctccttaaaatttattcaaatttgagtaattattttttattgtagtttctttctccaaagattgatgttccaactctaacaatggtagccccttcctctatagcaatttcataatcgtgactcattcccattgacaaaacatccatccctacattagggatgtttagttcttttatttgttttgataaatctttaagacctttaaatacacctcttatctcatcttcatcttctataaaaggtgccattgtcattagaccctttatttttatatttttatatttttctgacacttctttgacaaaatctacaacttcttctctatcaagtccatgcttagactcttctttagatatattcacttgtactaagcaatctatttctctgtttatttgttctgcacgtttttgaatttcttcgcataatgcaattctatctaaagagtgtatcatacaaactttatcgattatgtacttaactttattggtttgcaaagttcctatcaggtgccagtttaatttgtcacctataatatcatactttctagctaattcttggggtttattttcaccaacagaagtgattccttccctcattgcctcattaactaagtctacatcaacagtctttgtgactgccaaaagggtaatctctttgctgtctctatctactttttttgcagctttatcaattttgtttcttatctcagacaaattatctttaatagaacccattattatcacctactttatccttatatttgtgtttatactgttaggtcttaaaattattttgtcatatagattaacacttgtaactccatttatgtcatttttataataatccacaaatacagaagattcattctcataagttattccttctaatatgacaaattttacactttgtgattgttcatcaattacatatacaccacgtttattgtcttttgtttttatagaagttttaggtatttttaaacattccatctgattatatattatatcaaattcttcgacacttgtatcctgatttgcaacaatttggttacttatttttaattttaccattattttattattattttcatatattttgtaaacttttgcatctaatttttgctcatgatattcaattattacattttgatttttttcaaagttattagaatcttctttactgatgtatgtagatagataattactttggtcattggcatctttttctatagttccttttacaggaatctttgcatcaactttttcattttttaacaccaacgtatctacatttttgctaattatcattactaatatattaaatactaaatatataagaataccaagtatcactaatctggtatattttacctttttcaaagactctccccctataaaattactttcattataagtacttcttctaaaaaatgtttattccttttttataagctaatattttacgttctaataattattttttccatattaaatttattttttatcaatcttcctatacaagactgcattatttatatataattgtattataaagtataagtttaatttacattttatacattaagcttactttatatgtttttatagttatttttatttttagatgcaatataaaaccaattaagatttaaaataacttttgttatgttgacatttatttaggtaatcatttacgaatcgggataacgttatcataacaaaagtttatgtcctaaaaaaaatacaaggaggattttcttatgtcagaaattttattaggaacaggtttacttttattggttctatgttgtttcacaatttttagttacaaggccccatatggtatgaaggctatgggagctctagcaaacgctgcatgtgctactttcttagtagaggcattcaacctttctttacttggtgatgttttaggtatggaattttttagaagtgttggagctgctaatggtagtcttggtggagttgctgctgctatacttgtgcctttagccttaggtgtatctccagtttatgcagttttaataggattatcttgtttagatttttctatattatctggattcgttgctggatactttgtttctttcttaattaagtttatagagaaaaaagtgccacctggagtggatttagtggttgtaattcttctatgtgcaccgctatctcgtcttatagcatcaaatgtagacccattagttaatagtacactactacaaattggacaagttttgatagaagctaccaacattagccctataataatgggaattatactaggaggcataataacagtagttggaacgtctccacttagttcaatggctcttacatctataattggtcttactggtcttcctatggcaataggagcattaggtgcttttggttcagcttttatgaactcaacactatttgcaaaattgaaattaggttctaaaaaagatattatatctgttgctattgaaccattaacccaatcagacataatttcagctaatccaatacctatatattctactaatttctttggaggagccttttctggtatcattgtagccttgatgggtcttgtaaacatgacaccaggtacagctacacctgtggctggttttgctataatgtttgcttataatccagttcaacaagttcttataacagctggtttatgtgctttattcaatgtaattgcaggatttttaggttcaaaaatattcagtacctttaaagttcttactgctggtgaaatacgtggtactgatgtagaagaagaaattgcttaaaaaacaataagatttataaatttatatctcaagtagtagagttttatattgtaggcaattttattaattgcaaacgttttattttttatttatgtttatgattattatgtgtgttgaatatttagataaatttttatttattatttttatttagatttttgtttagttttttatttggttgatatattaggaataaaaattagtatagtttattattagttagatagcataactttttagatacataaaaaattttatattaattagatattattaaaataaaagcgatacatgaatttttaaatgtccatgtatcgctttatttttgccataatcttaacaactgatttttaaagtttattatcttaacgaagttcattatcttatataatatttaaatgcatagacttctttaatttaaccatctaaatatttaattaaatattattatatgtaatataactaatttttaaatgaatgtataggagctggaatccttcctcctctttgagtaaataattcagatgaatttgtacttataggcattactggtgctcgtcctaaaagtcctccaaattctaccatatcacctacatcacatcctggggctggtataattctaacggctgtagtcttattattaatcatacctattgctgcctcatcagctatcatagctccaagcgtacctgctgtagtatttcctggcacagctatcatatcaagacctacagaacaaatagcagtcattgcttcaagcttatctatacttaaagcacctttaataacagcatcaatcatacctgcatcttcagatactggtataaacgctccactaagtcctccaacatgtgaacatgccattactccaccttttttaacagcatcatttaaaagtgctaatgctgctgtagtcccatgagtaccaacaacttcaagacccatttcctctaatatatttgctactgaatcaccaatagcaggtgtaggagctagtgataagtctattatcccaaatggaacatccaatctactagaagcttcctttgccacaagttgtccaactcttgtaattttaaatgcagtctttttaactgtttctgaaacaacatcaaaaggctctccctttactttctctaaagctctcttaacaacaccagggccacttacaccaacatttataattctatcagcctcaccaacaccatggaaagctcctgccataaatggattatcttctactgcattacaaaatactactaattttgcacaaccaaaaccttttgcatcttttgttaattctgcagtttcttttatgatttctcccatttctttcactgcatccatatttataccacatcttgtagaacctacatttactgaagcacatactttattagtacttgctagagcttttggaattgacttaattagtatcttatcaccttttgtatatcccttttgaactaatgctgagaatccaccaataaaatctatacctaaatcctctgcagccttatccaatgtctgtgcaaactttacatagtcattttcatctgttgcacctgcaataatggaaattggagttactgatacccttttatttacaattgggataccaaattcacgctctatatcttttccaaccttcaccaaatctttagcagaactcataatcttattgtatattttttctctagctttatctccatcagggtctatacaatctaataaagaaatccccatagttatagttcttatatccaactgttcttcatctatcatctttattgtttcaagtatatttcctacattcactattatcacctccccttactgtctactacagattatgcattgaattaaatatttcttctcgctgaatttttacatccactgataatttcttacctctttcaaccaagtcctcaaccgttttctcaaaagaatttaatgatttctctaaatcaactatcataatcatagtaaaataatcctgtaatattttttgtgatatatctactatgttgatattttgcttgtataattcatcactaattcctgccactatacctggtttatcctttccaattactgttaaaattgctttcataataatatcctcccttatttttttataaatcttatatttttacaaattgaactatgtattaacatatatttcatttatttgttagtaaaccactttttatgtatatatttaatatattttaatacctatacattcatttgtcaattttttttcaatattccattatttttatactatttagaaaattcatattttatatatgttttctcaacaataaatacagttttcataataatgaaaggtattacttagcaatctcgtgattttctaaataatacctctctaaaaattatttttttaattttatgaatttaattatactttttctagtatcaggatttacaattaatatagaaccaatcataattggtgttagtatacaaaataaaaaaataatatctttttttagattatattctttagattctaatttataattattatttattattccatcataatcacttatatttgacttatttttatttgtatcttgatttttgttagaaatactttccctataaggaaaagaatgttcattggtaccaaatactgattttgagcttaaatcataattatcatcattttctgtaattggatttttattgtaaaatcctttttctttatcagaattattttctttattaccgtctttaggtatatcatgaggatttttattttcattgctatcagtacttgattctacatcatctttaggagtatttggttgtttctcatcagaattattattttcattattattgttttgattgttattactatcattattttcatttccattattcccatcttgattgttatcatcctcatctctatccgggtcgtctctacctcctcctccacggtcaccatcaatatcatcattttcccgttcatcatctggcgtctcttggttgtctccgcctcccattataaatcctggtttaaaaactatatttgaatacccttcttttaatcctcctaccacttttactctaaaacaacgcaacttaaaatcttcaaaaaaaagtatagcttgatctctaatatcctcctgttcttcagatatccaattgattccatcgcttgaatattcaacaaaaaccttacttgcactatacggcatatcataaaataaaacagctacatatccattttttgtattttgaaattccagttccaaattgtctattgtttttttctctataacagatacattcaaaataggaactacatcatcatttattataattttttctttatttaacatttctgttttaaactttcctgttatatcaaaattttctcccttttccaacttttcataataatcagtaaaatcccattctacatctatatcaagttgattaccactagatgtttctaataccatatatttgggaaattttatattttctattttatcatctttacttacttttatttcatcactaaatacaccaattcccctatgacaacatttcacaatattatagccagaatctttagctatagagggtataagctcattataatcatcaattatataaactttcttactttctgatataattgattgtgccaacttattattatctcttagtaacccactttcattgttgctactatatgcttttattgaagtttcttctatctcaacatcacctttagaataaacacctatagcatgttctccattcacttcaatatccttatttagtattctaatatcattttcagtataaattcctattgcatcttttccatttgcctttattttttcaacagattcgtaggatgatttaatatgtaagtctcctccttcttcaacgtataaggctgtcccatcagtagcaattatgttgtttataccaatacttatacttccaccattttctatatgtattactccttcttttcctccttcacctattatattcaattcattatcatcaataataaatctcccatgattttttatcaatattttatatttgttggtatctattgtaaaattactgtcataaggaatataaaatctaaactcttcatctattaccatattacaagaaagagtataaactatttcttctttattatttttattttcttgaacccacctttcaaaatcttcaagacaattttcctcttgtccaaaaactttatgtggaaaacttataaaacacaaaactattatactcataaaaataaatatctcatactttttcatcttacactcctagaaattttttagctttgaaacaatcctgtcgaaacatatacttcacccactataatttttccacaattatcaattattgtcaatttatataagtatctttattaattgttataaataaaaagctacttactaaagtaaacagacgtttcactttaataagtagctatatttttataacaaaatagttataatattagaacttccttcatttacaattttttgtaaagtcttttgcattttaactcttatctcttctggcatagtatataatttactttgtaattgctcttttactaagtcatgtagtgacttaccaaacatatttgattcccataaatctgctggttgctcttcaaatacttccataagatattttatcatctcttcaccttgattttgatttccaactattggagagacctctgtagatatatctgcttttataatatgaagtgatggtgcattggcttttaacttgataccatattgttttccttgtttcattatttctggttcttccagactaagttcttctaaagaaggagctactactccatatccttttatcttggcatctattaaagcactttctattttatcatactcatttttaactttagatagtctagttatcagactaagcagttgataatctccttcaattttaaatccacttttttcttcaaggacattatagaataaatcttgctttgtctgtaaatcaatatttataacaccttctcctagctctacattatcaacacctgtatcttccaaaaactctaactcagaaaatccttgtataataccttctatatctcttattttacctatatctataatactttgttttaatgttgttattatgctactttttatccaatgatttctttcaagaccttcaacccattttggtaagttgattcttatttctgtaagtggaaaatcatataatacagcttccataacctcctctatatcttcttcttccatttcaaccacattcattggaagaactggaacttcatacttttcttccaattcacttctaagcatactcgtttcctcactttttggacttaacgtatttaaaaccactgcaaatggttttttaagatttttcaattcttgtataactctctcttctggttctacatagctttttctgtcaattccagtaactgaaccatctgtcaagacaactatccctattgtagaatggtcttttataacttttttagttcctatctctgctgccttttcaaatgtcatagcttcttgtgaccaaggagtggatactaatctttgttttccaccttcctcatgccctaaagctccttcaactatgtatccaacacaatctaccattcttacttttaaagatactgtgtcttttatttttatttctacaccatctgctggtacaaattttggttctactgtcattatcgttttacctgaaccactttggggtatctcatctcttgttctatcctttttaaattcattgtctatattaggtataaccaacttttccataaattttcttataaaagttgattttcctgttcttacaggtccaactactccaatatatatatccccctgagtccttttggatatatcttcgtatatgttattattcatattattcctcctatacatctaatcttattaaattatatttagagttaagggttaatattcttaaaatagaaaaataaagaccagcaatattaatttaatttacatatagaaatttgtaaatttcaatgtaaattaaattaatattgctggtccaaatagtagtgtattatattaactgactttagtagtattttcatttgacttattattcatctcaataagttctttacgtctttcttttgtcatgttcatccatataaatgtaaacaccaatccaattatggctactatagtaagaactatgaagtagtacctatatccagttacacccggaaatgcatccaatatcttccctgctgctaaaggacaaagtacttctggaagatatcctaatgtagcaactattcctatagcagttcctgatattgataatgaataattaccttcttcaagtaacgaatagtgtaaaccttgaattgcatacatagatacatatattgcaacacatccaatcaatagtatataaatcatagatgattttgttggtgtaaatattacacctaaaagacctgcaatcataagtataaatccataagatataatctttgatgaacctactttatctccaagtaatccagaagcagctgatgctactggtctacaatactgagctaatattgagattgcagatgcaaacaccacagtagctccaaatgcttcagttgaataaggcgtaaaataataaaatgacatattagctgaatatgaacaaaacattattattgttattatccatgtatgaggcatttttattactgcaaaaaaggcttctttatcaaattttgctgatacctctttttcattatcctttaatttgaaaaatactaatactccaactattacatttattgccgagtataatactataatagctgtaagaccagatttatcacttacttttgatgaaatatacccaaatagtatcaatactagagatagatgaattgcattggtaattccacgaccactttccataaatccaaaagcttttccttgttcattttcagatgctaacattctaacagcttttacaagagctggccaaaaagtaagtattgttgttattccccataaggcatggattaaaaacacaacaatatatggaggataaagtgttaatacaagaccagatattcctgtaataattaaagaacctgaaagcaattttctggctgaaatacggtctgctaaaaaaccaccaaaaaggtatgataccattgcaagtagaccataaatgcttcctaagcttcccatttgtgtatttgtaagattaaatgcttgtgcaaaagtatcataataataattctttaaatatggtaaagcatatataaatgctcctgctacaaagagtattatcaagactttgaaatttttccaaatgcttggtttatttacttcaactgacatacttcctccttatgtaaatacctgtaaattttcatgataattaattattgcttattttattgtttattcaatatttcggaatatttattaatatattaggttaatctatcaataatttatggtgagttatgagctaaaagtaaactcttttagctcaccataataattatatttttatttatactaacgtccagagttattagatatctttttttcatagttcttccatagcattaaacctgttattataacaaaaagacctcctcctatcatttcaatctcatagattatattatcttttaaagtctccataactggtgccgttgagaaaagtatgccaactacagttactacaagtaccattctggcaatattgatacaaactgaatcactttttgcaattgaatatggtctttcttcatttggtcttgtctttctaagtctaatataagatgtaaaaagcaagacatatggaaataatgctgttaatgctgtcatagtaacaagaacattgtatatattatctactgatggtaataagtttgttcctacaagaagtagactcactattatagcctgaactattactgcatttgatggtatattgtatttatttgtaacagtcaattgcttaggaaatacaccttctcttacatttccaaaaagcatctttactggacctgctatataaagtattaatgctcctagtactgataaagttattccaaatgctactattcttataaaccaacttcctatacctaaatcttgtgcaactttagctaatgcatctagtatccctgtagacgctgcaattttatctggaggaagtatcattgttattgctactgaacctaagatatagattcctcctattaaaacagccacagttaatatagctttaggaaagtttttcttagcattatccatttcggttatgaaattagcagtcgtttcagctcctgataatgcaaatattatagcagatatagaaactaatgaattggcatctatttttggtattatattttggattgtatatatcgatgctgatggagcttttttgagaataactacagacataaatgccatcactataagtaatatagcaggaattgtagaacctaatgctcctgtattcgtaaaaaattttccaaatgccatcccacgagtacttactaaggacaacagccaaaatattatgagtgaaagtgctaaaataaacatcttattgtttgataaatctggatttccaagcatatatgcaatatttatagctaaaaatgtcaagaaagaagaataccaaaatatctttgatgtccaatttagccatgacaccataaatccccacttctctccataggcttgtttaacccattctccaagtccaccatcttttggatatgttgcagccaactctgcacatataagtgatgcaggaacaaagaatataaaagcaaacaataaccaaactggtatagaaccaagacccaatccaaaactagaggcagtagatttagctatccatctaatcccaaatagtgctgatatattcataaatactaaatcccaaaatccaattttctttttcactgtaattcctccaatttcaaatttattcaaactcatacacaatgtattgatttaaatatcaagtataagttcttcaacacttcttggataattagttataattgtagcaccattcttacctactattgctgtatctgagtgtctaaatcctccaactccaggtatatatatccctggctccatagaaaataccattccttcttctaatattaattcattgtcaaatcttaaatatggctcttcatgttctgataaacctaaaccatgaccaattctatgatttgaatataactctagaccatactttgcaacaacagctcttgctgcttcatccaccattcttgctggtataccagcttttattgtatctaatccagcttgttgagcctctactgcaatcttaaacacttctttttgtctttctgttggtttacctataataaaagttctttcattttctgctctatagttttcataccaaacctgtctactatgtattactatatctcctctttgaagtatcctagtattggaatctaaatgaggttgtgctgttctatcaatccctgaacaagtccagtttgcaaatcctatatatgtatcaggataattttcagaaacatattttagtaaagcattatcccccgcaacgtcaaactccaattcactcatcccaactctaacattttctaaagacccttttattcctatatcagataggtaacctgctatcttcaaaaattctatttcttttgcatcttttacatatctcatttcaaatattttacttccaacatctttgatagcaaatgacttatcagttatatactctgaaaaacttgcagatactatatctttttctattccaacagttgttcctttagggtatttatttaaaattatatctaagtaatgtttatgtgatattccatgttctttcatttctggtatttcataatacacatatacattatcaacttttgcaacttctttagcatgtaattcttctaatccaggtactattaattctattttatcttgagttactactgttacaattggtctagaataagttattgctttaaatccactaatataaaattgattgtctggttcaaatattaaagcaatttcaatgcttttttcattcatgtactttctcaatctttctagtctcatattatttgacataatgcacctctttcttaatattcagataatttattcaatacaacaaggataaatatattattttaaaattcttaatatttttagtacttgtcgtatttgcatgtaaattaattttatttgtgattattttatcataatcatgattattttgtcaatcacgattttatttttaaaatttttttatattctagtgattttaaattatctaaaatataacgagtatacattgtattttggaatattattcttgatttatggtaagtttaatgataaaatcacgattatataaactatattgattatttgtaggtgaataaaatgacaaataaagaattacaaaagaaaaggatattgatgtatttcatagaagctgctcaaaatattatggaaaacgaaggtatagaaaatattacacttcgtaaggttgcagatatggctggatataatagttcaactctatataaatactttaaaaatttagaccatttaatatcatttgcatctataaaatattttaaagattataacttgaatatttcaagatgtatagaaaatgtcaatgatgaatataagaaatatataattatgtggaaattattttgtaagcattcttttgacaatgctcaagctttttatcaggtattttttaacttgtctagtgatgaacttagctatataacaaaacaatattatgatatgtttccagaagatttaggtattcatgatagtgacatatctttaatgattacaggagaaagtataaaggaaagaaataagatactattaaacaatcttgtagatactggatatataccagctaaagatttagacataatcaatgatataattatttctttttatcaaaatctattattcttaaaaaagaacacaggaaaaaattctggtgatgatgaattaactatgaaaatgatttcttctattgaatacataataaaacatgctaaataaaattaaaatatggctgtctcaaaatagagataagccttttttattgttgaaataataaaaatatatttaatttcatataaaaaaaagtgcctcgtaaactaaaaagttcattttgagacacccctaaaacaaatttattatttattatacaatagtttatatatcatcacctaaaactacttcttccatttcatgctttttacttctcatcattagttctattccaacttctttaggatttgaacctttatttattacagaatatatagcattagttataggcatatctatatctaatttttcagcaacatcatgtgctacttcagtagcagttatgccttctacaaccatctttacttcttttaaagtatcttctaaactcatacctttacctatgagtataccagctcttctatttctactatgcatacttgtacaagtaactattaaatctccaatacctgaaagacctgcaaaggtagacatattagctcccatagcaattccaagtctgctcatttcactaatacctcttgtcataagggcagcttttgcattatcaccataccctaatccgtcacatatcccagctccaaatgctataatattttttaatgctcctccaagttctactccaactatgtctggattcgtataaactctaagtttagggctcataaataaatcttgtatcatctgtgctatttttaaatctttagaagcaactactacggtagtaggaatatcccttgctacttcttcagcatgagatggcccagatagtattacatatggattttgtggtaattcttcttcacagacttgagataatctaagcccagtccctttttcaagacctttagctacattaacaataacttgtccttcttttataaatggttttattttttggcaagtacttcttacagcctgtgatggaactgctaaaactattaccttacaatcttttatagttttttctatatcagtacttatagttatattgtttggaaataatactcctggtaaatagtctgtattttctttagttctgtttatttttttagcttgttcctcttttcgagtccacatgctcacatcattacctttttttgcaagccctaaagctaatgcacttccccagcttccagtacctaatacacatactttctccatgtttaacaccacctgagtataatatatttactattctttcttttgaccaatttttctctctgtcccatttaataatcgctttatatttgctctgtgattatatattactgatgcagttaagaacagagctactattaaaccagctttattttttaccataatcataaatattggtgaacatcctattcctacaacagaacccaatgaaacatactttgttatagctaccaccaatataaatactgctagacacattagtgttattactggatttacagctagcattgcacctagtgaagttgcaacacctttacctcctctaaatcctaaaactgctggccaattatgacctgctacaacacatataactgccagatatccagctaaaagagtatctattccaaccaatcttgctgcaaattctgatattaaaacagccattacacctttaagaacatcacctaaaaatgtcattgctcctgctctttttccaagtgtcctaagtacatttgtcgaacctgcattaccagaaccttgagtccttatatcaaccccagcaattcgctttgcaactatgtatgaggtagatatatttcctaaaagatatgcaactacagcaataattatataactaaatatctccactgaatttcccccctttagttatattttaagatatttattttttatttttttgtctatactcaaactttatggaagttccttcaaatccaaaattttctcttatcttattctcaaggtatctttgatatgagaagtgagttaaatccttatcatttataaacaatgtaattttaggaggtctaatgtcagtttgagtcccatagtaaatttttagtcttctacctttgtcagatggtggttgatttaacattacagcttctccaattacttcattcagtgctgaagttgatattctcttagaatgttcatttgacacatattcaactgtatctagtatcttgttcattctttgattagtttttgcagaaacaaatacgattggagcatacatcataaatggaaatttttcttttatatcttttgtgtaattactcatagtcttattatctttctctattaaatcccatttattgattacaaatatgcatccttttccttcatcatgtgctatacctgcaacctttgtatcttgttctgttacaccttctaaggcatctattactatcaatactacatctgctctatctacagcactcatagctcttattacactgtatttttctattgtctcatatattttactttttcttctaagccctgctgtatctattagaagaaatttctgtccatttttttcaaaataagtatcaattgcgtctctagtagttcctgcaattggacttacaattactctttcttctccaagtatcttattgagtatagaactttttcctgcatttggtttacctgttatagctactcttattatatcttcttcatactctgtatctaatcctgctggaaaattttcaactatctcatctaataaatctccaaatcccatactattggctcctgaaactgcaaaaggcgttccaaatcccaactcataaaaatcatatatattatcaaattgactttgactatcaatcttattaaccactaagattactggtttttttgtctttctaagcaattgtgcaatttctttatcagcagctgttattccagctttaccatcaactataaaaagtattacatgtgacatgtccattgcaagcatggcttgatttctcatttgagataatattatatcttcgctatcaggttcaattcctcctgtatccactaatgtaaaatatttatctaaccactctacttcagcaaatattctatctcttgtaactccaggtgtattttcaactattgatatcctttttcctgcaaatttattaaatattgtagacttaccaacgtttggtctcccaactacagctacaactggcctacttatactcattttatttctccttccatcttttgttttctattttaaaattttatccacaaagtcttttccttcattcaaacaagggataatttttattctcataagttcttctaattgatttaattcaatattatctaagaaaatttcttcatctgcttttagcatacttcttgttatataaagagcttctcctaattctttatcttcaagttgttcttttaaatccttagctgttaaaagacctgatacagttattgtctctccaaaaaacttgtttttgatttcatatacatttacttgaagatttttaaacttgtccatcatagcatctgccatactctgtataaattcatatgcagaatgaccagtagctattgatactttcttctctctttttagaatattctcaggcaatatatttagatactcttcaatctctgtttttaacttacgtatcatacctacaccatcttcaaactgtaaaaaaccttcatattcttcatatccaggcaattcactattagatagtatataaaattcatctgataaaaatgcaaatcgagtacctaatttttcaagatatttctgttgtatttgatgtatttgctctatagttttacttgcgctcttatcattaaatatatttaattctactagattttctctatgctttgtaatcccaactggaactatcgcaacactgtttacatatggataaagttgagctagttcttttattgttctatccaattcctttccatcatttatacctggacataaaacaatttgacagttcatttctatatgagcatctgccaatctcttcattataccatataattttcctgcaaatttattgcttatcattttttgtcttaactctggattagttgtatgcacagatatatttataggacttattctatattttataatattatttatatcttcttcactcatatttgtaagtgtgacaaaatttccttgtaaaaaagataatctcgaatcatcatctttaaaataaagagtttctctcataccttctggcaattggtctataaaacaaaacatacacttatttctacagcttttagcttggtcaattatcggatttgtaaattcaacacccaaatcttcatcatagtctttttctatctcgtatatgtagacttcgccatcttttttttgtatttctacatctaaatattcatcacttagtaagaatctatactctattatatcatgtattggctgttcattcacagatataagtaaatctcctacctctatacctatttcttctgcaatactatctttataaaccttacttataatattatttactttttttacatttacttccaatattttcaccactcttttgtattcatcaatgcttattataatatattttaatatgcaatttatttatttattatattttatgatagcatttttaagcatttcatgtcataataacacattttaattctaatagtcaatataagtaaatagctataaaatagattagaacaaataatattcaaatttaagtttcttaaaaatttgaatattatttgttcttaaaaaaattttataaatttaatgttttactatgattaacgtcccatttgtcatatcatgaaccattccacctacacactttgacatcaacaatgccttattttgtaagtctttctcatcatttgcataaaatattggacaacctccaccatttttcatattcttatcaagtgtaactatagctagggtatattcatttaaacctatatccattcccatcttatgcacttcctttctttcctattttataattttttagtgataagttttttcctttagagcttgaaagtattgggcatgactttacagcttccattactttttccatattcttatctactggtaaataagcaatcattatactttcatcctctttatttcttctaggtaatggtacgaatgaaggttctccataatctccatataaacctaaccttgaatatatattgtatactattgcttgtctttgaccggagtcaaataatattcctgcattagcataatccttatttttaggaattatttgtattcctacacctctattaatatatacttctctatcactttttagacctatatttgttataccttttaaatctcccacctttagtatagattcgtccacaaaactaatttcagcaggcattacatcagctatgtctccaatactttttctagtaagaagtttttttaatataaaggctaacactaatccacaaattgaacttattaccaaactcatcccttcacttattttcgtttctgcaagtattacataatacaatcctattgttaaaaaagatgtaactatacacatataatttcttacttcataggttctagctatctcttctatgaatgcagcacctctctttacaagttgaacttcctctaaattttgcaatgtatttcttctatttgctctcacttgtctaaattgttctgctgctagagataaaaatgttatggatgtataagaacgatttataagagctggaaccaataatgctcctaatgaagaagcgacgaatgctaatataagttgagatagtaaaacatttggttgcgttggatactgtttttggtctaaattcaacattataattctagatgttataccaataataacagcaacaaaaaatactctatccattaaatcactcctaaaatatttaatttgaaattttacatgtaaatctacaaagtctttctagaaaaatcactctgctttccttttgatgtttctatgataggtgtacttttcactacatctatcatgacatctatatctttgagtattggcatatatggtataaccacagtacttttttctaaattggtcttagatatagcaacaatatcaacctcatctacatctctatctatccccatatgaataaatagattatgtattatagcttgtctttgccctatatcatttactattccaaatgcacctaaatctcttggtataacttctatggccagacattcatttctatacttttctcttgtactttctagacctatattagttattattacatcatttaccattaaaataggtccttcaaaacttatttttgcaggaactatatctgctatatctgctatactgtttcttcttaaaaatcttctaaaaatcaagccaacaatagctcctgacacaatagctaaaattgtgcaatgaaaaaagctaaggtcatactttcttgcaaaaacgatataaactatcgaagatactagtgcagaaaaaagacttatataacttctagattcatacgtagatgctatttcttcaacataagcatctccttttggtactaattcttcattatcaatattctttagtgttattctttcttgttccgcaagaccttgaaactgttgtattgctactgcaaaaaatgtcaaggctgcaaactccttatctataagtgcaggtaatgctatagcacctaacgaagctgaaagcccagatataattatctgttctaaataatcttgtggtcttgatgggtattgtttgtctgtaactcttaaaactaatcctctacataatattcctacaactaatgcaactataaaagagtgtctaaataaatttgcattcaataaactttcttccattttctcagctccttctcttatatagtttgtgcaaaaaacaaaaaaaattcccttctatttaaggaaatttttttgtaatattgtaactataaattcgctaccaatgccaagttcactttttacttttatacatccatttagtgatttgactatatgctttgttatagccaatcctaaacccgttcctcctacatccctacttcttgctttatctaccctataaaatcgttcaaatattcgttctacatcttcttttggtatccctacaccattgtctataactttaattacgattttttcttcatcttttaacactacaacttgtacaatcccattatcttgggtatactttatagcattatcaactaggtttaagaacacttgctttatatagtctttattggatagtatacttattgatttatcatcacatttatataaaacttctatatttttttcactagctgaatgttgagttatttcatatacctctttaaatacatcatatactacaacattttccataagaagagtatctttattttctacaaatgataacagcaatatatcatcaatcaacctttttaatctatctgattcgctttctattatttctaagaatctatttctagtattcacatctatattttcatttgactttagtgtttcaacaaacccacttatagatgtaagtggtgttttaagttcatgacttacatttgcaacaaaatcacttctcatattttcaagtttaacttttttagtaatatcttctatatttactatcgaacctattattacgttgttagtattctgaagataaactgggtctacctttatcttatatacgatatcatctttagtagtaatattagcagtttcattatctttagaaccaataaattgaagtatttgttttaatatttcttcttcttttattacaacattaatattatgaccttcaactaattgatttggttcactctttatcatttcttttgcttcatcatttatcagaagtatatttccatttacatctatagccaaaattccatgagatatactctttaatatagatcttaactgtaaatgtttatactgtacttcttctaaggttttatccatattctttatcatatgattaaaatttctagctaattcaccaagttctcctttggctgatatgttaagcctagcatgatattcattattacttactttttttgagacgtatataaactcttttaaatatttccttaatgttattgtatatcttacagctaatataacaatggctatggacaacataacaataaaaaaatatatactatttaaatcttccacaagataacactcctaaaatataacctttttaatctattttataccctacacctcttatagtctctatatatttttccgatttatcttcatcttctattttttttcttaaatatcttatatgaacatctactgttctagtttctccatagtattcatacccccatattttatccaaaagataatttcttgaaagtacttttcctttattttgaattaataattttaacaattcaaattccttaagagttaactctatcttttcagagcctttggtaacttcatgttttgataaatctagttttaaattgcctgtagtaagtatattgttttcttcacctaagctagtcaaattatatctccttaaaacagaactaatcctagctaacaactcttttatactaaatggcttagttatatagtcatcagcacctatttcaagcccttcaaccttgtcattttccatatttttagcagtaagcattataacaggaatattttttaagtccttatcacttcttatttttctcaaaacttctattccacttatatttggtaacatccaatctaaaagtattaaatctggtttaatttccttagcctttataaatccgtcaaatccatcatatgaataactaacttcgtaatttgacacctccaaattgaattttaatagctcaactatatgcatttcatcgtctataacaagcactttagtattcattaaaaagctcctctctattttatctgtagtaccgttcctattcgttctgatgccttattatgttttctataagagtggaatttatctgctctacaactagtgcataaatttaaatttattatattttcttttttaactccactacatctaagcatatactcattaattttccataaatctaaatagtaacttccctcttttattatatagaacttttcatcattatttgtaagaattgtgttaaatttttctactaaatcttcagacacttcatagcaacatggtccaattgatggcccaattatacatactaaatcttcaggaactgttttatagcattcagacattaattttattgttttatgacctatattactaaaagtccctctccaacctgcatgagccagtcctatggctttatttttagcatctataattgatataggtacacagtctgctgtaaacagtaaaagtggtactttttccaagtttgttataagtgcatctccatctcttcttttccctatagtatctttattgactatattaactatatctgaatgtatttgagaattactagttatattttcaaatgtcaaatcacattctttacatacttttaacatatcttctctattttttgcatctatattcttacatgttataactagatttacagaatttaatttttcatcaagttcttcacaattaccacttaaattaacatactctttaatatcttgtacattttttatatttatataatctttcatcatttgtctcctttttctatcagtatacttttaagttcatttacaaaagtatttatatctttaaattgtctatacacagaagcaaatcttacataggcaacctcatctaactctttcaatttatccattaccatctcaccgatttttttggtttcaatttcttctataaaacatttatttatttcattttcaatatgtacaacaatactttcaatctcttcaatagaaacaggtcttttttcacatgcttttagcaatccatattttatcttttctctatcaaaatattctctactattatcctttttaatgaccattaaaggagttgtttctattttctcatacgtagtaaacctctttttacatgattcacactcacgtcttcttctgatagattttaaatctgtatgtctagaatctattacctttgattctttataattacaataaggacattgcatctatattcctcctttgtttaactatatctcaaactcatctaagcttaattctgaacctatatttactattattgtatcacaacctattttaagtatatcattccaaaatataacttcttcatcccctcctcttgaaaaaaaacttctacttccatctccaaaaatggtaaatgagactaccttaccttcgtgaatatccatgtctatgtctattataaaccccatcctttttccattttttacatttataatttctttttccattatatcagaaactctaatcatattgtactcaccctttctttaaaaataaatatgtatcgaagtaaaaaaaaatgacctatataggtcatttaaattaaaataatgtttacagtccatggattacttatacatattttctcatattttttaaagcatttttttcaattcttgatacttgtgcttgagatataccgatttcatcagcaacttctatctgagttcttcctttgtaaaaccttaaatctaataccaacttttctctactatttaatttcttaatagcttctttaagtgatatttcttgcaaccaattttcatcagtatcttttttatcttgaacctgatccataacaaatattgcatctccattgtcttgatatactgggtcaaacagagatattgggtcttgtatggcatcaagtgccattacaactgattctacttctaattctaattcctttgctatttctgatactgtaggttctttagaatttgttctaattaatctttctctaacttgtagtgccttatatgctatatcttttaatgacctacttactctaattgggttattgtctcttagatatcttctaatttctcctataatcataggaacagcataagttgaaaaccttacattttggcttaaatcaaagttatctatagcttttataagaccaatacaacctatttgaaataaatcgtctatattttctcctctgttgttaaacttttttattacactcaagactaatcttaaatttcctcttacaaactgttgtctggcttcttcatcaccattttttatttgtaataaaagttccttcatttgcttatttttaagaactggaagttctgatgtattaacaccacatatttcaaccttattaacttgcatatattttcagtcctctctcaaaagtattcatctattgaaattatttacatttccaatttttttatactttttaagaagaattaatttaacattatacaaattttttcatttctttttgcaaccttgagattattttcttttcaagtctagatatgtaggactgtgatattccaagcattccagcaacttctttttgtgttttttcaatacctttatcaataagaccaaatcttaattccataatttgcttttctctgtcacttaatctgtcaagtgccataaccaacaaatctctatctatttcttcttcaattattttgtatatttcatcattttctgtacccaatacatcagataataaaagttcatttccatctaaatctatatttaaaggttcatcaaatgatacttctgttttctttttattattttttcttaagtacattaatatttcattttctatacatctcgaagcataagttgccaattttatatttttattcagtttaaaagtattaactgcttttatcaaacctatagttcctattgaaatcaaatcttctacatctatacctgtattttcaaattttctcgatatgtagactactaatctaagatttctttctattaaaattgactttacactttcatctgtttctagcttttgtaaaagctccatttcttcttctggtttcaatggaggaggaagtatatttgcccctcccatatagtatattccctttggctttattatttttaatttaatacctaacatagtaataaagcttattattctttctttcaatcgtaacattccttgtcccccttaaattttcacctaaaatccaggcaatatatttggattcattattgctccatattctctatcattaaaatttgaaataccaagtattatatttcctatcttttgctcatctacttctatatagtcagcttttaagcctattattatgcttgtcttattacttccagcatgtttataaggtattattctaactctacctgaagttttatcatctaaacttcctataatttcttgtgctttcttcatatctatatcttcataattaatatttaatagtttttctggaataaatccttctaacacactagacttaactattattacatcactttgacttattgggtcttttaacaaattaccactatctactaaagctttacagcaaaaacttttttctagtaagtttatatttatagtctttgtaagctccttaatgtacttaagcattttcaaatctttataaatgtattttaataattcacaactcacataagtacatgcaattaagaaagatatttttaagtgacttattcctgtaaaataaattataaaataagtgcttccagaaataaaaatgtttactagataaaaaactaacgctacatgaacataatcttttttgctcttgcttctaaatgaaattaaagttattatgctcatgattattattttaaatggtacagtaaatagtatattcattgatggatacaaataagcaacagaataggcacttcctaaactagcccccaataacttattttttttaggattatatcttttagtaagaatagaagtacaacttataataatataatttattactaggttttctataacatagtactcaatatacaccatgtatccccccttaaaacctttaaacatattataagatagtatgtacaaaattttatgtcacttttgatggtcgaatccaaaacaaattctatttaaaaagaacaatgatatatgtcttatactttatgtcgtcaaaagatatttttttaatgccaaacagatagacttttttgtagaatccaatatatctaggtagaagttattcgctttacttttggtatatttataaaaaaaagactacataatttaataatatatcaagtaaatcttttacttatataaaatcaaattatatagtctgtaaattcaaatataaattattgtgctagtaatccatttgcatattttgcagattcatttagtgcttgttctggagttatgtctccagctatcatcatttgaagttgtttccataaatattcatatatctctactccatgaggtccaactgtcaatggtctatacatatgtttatctcttgtcaccatttcttcaaatcttgggtctccttggtatttttcacctttagcaactggagctctaggtatttctttgtggaaagcttccattgattctttgcttaacatatactcaagaagtttaaatccaagttctttatttttacatgctgacattaatgttaaatcatctactgaagcaaaacttccaactgtcttatcttctaatgatgttacatatccccagtttaaatccgggaatgatttatcaaatgtacttgtagcagcagaggatagcattatagtaaatgcagcttttcctggtccaaatacactttcaatcatttcattactatcttttgataaagcatcttctggaatatactttttcatatcatttataaagtttgcagctttcaagccttctgcattattaaatttaactgattttaaatcatcattatatatatctccaccagcttgccataaatacggataccagttccagtttaagcttccaaatactttagaaccccaaccttgtgcaagaccccactggtcgatttttccatctccatcagtatcttttgttgctttttcacagattcttttaaaatcatcccatgtttttggaggtttttctcctaatttttctagtatatctttattgtagtacaatacgcctggattagcagcttctataggtaaaccataaataccacccatcatttttgcatcatctaagtatagataattatctgaagttcctgatttttctaaataaggtgttaaatcttctactgcacccatttctataaattgagggaacatctctgcatacatgtatcctatatctggaccttcacctgcacttattgctgttgcatatttttctgcgtagttatcccatggtactatctgaaattcaatttcacagttattttctttttcaaatttttcaaatatcggcttccatgcatctgcatcatggtctgttaatggtgcagaccatacaactaatttttctttaccctctttgcctttagaatcttctttttttgaacatcctgcaagaattgatactgatagaatccctaccataactaaagaaagaaccttttttagtttaatcatgcttaatcccctttcagactttaatttgtctttttcctcaaatgtttacatttaattcagatttaatattaacaaataagactactcttgtctaatcataaaaaactatactaactcctataactatattttttttctatacctattagatttaattcatactaaaaacttactttttaaattttatcaatatttaaaaatatttttaagtctagccacaaactaactatctaaattgaacaaaataaaaagaagtctattgacttctttataagcttacatattatcttcttcttcttaggaatgtaggtatctccatgctctcatcatcatcttcttcaattatacttgcctttttaggaggctctattttttcctcagcaattacttcttcttcaatttcttttacagcttgttttactgttgtatttaatgaagaacgtatgcttgatttaggtttagtatctaaatctaaggcaccattttgtaatccttcaaatcctgttgcgattactgtaatcattatttcatcacctaaatcttcttttatagaagctccaaatataacatttgcttctgggtcacaggattccataactaaagttgatgcctcattaacttcaaataatcctaagttaggaccacctgtaacattaagaagtactcctttagctccttgtattgatgtttctagaagtggagattgaatagcttgtcttgcagcatcaattgctctagtttcaccactagcactacctatacccatatgagcaagtcccttgtctttcattatagtagtaacatctgcaaagtccaagtttattaacccttcaactgctataaggtctgaaattgattgtataccttgttttaatacatcatctgcaactgcaaaagcatctaacattgatgtatttttttgtactatctgtaaaagtctatcatttggtatcgttataagagtatctacttttgatttaagttctgctattccaccttcagcgttcttcattcttatcttaccttcaaatgcaaaaggtttggtaactacacctactgtaagtatccccatttcttttgccaagcctgcaaccactggagcagctcctgtaccagtaccaccgcccattccggctgttacaaagaccatatcagctccttgaagtaactttactatttcatctttactctcctcagcagctcttttccctacttctggatttgctcctgctccaagtcctctagttaatttttctcctatttgaactttatattcagcttttgatgtatataaagcttgtttatctgtatttactgatataaattcaacgccttttagttgagcttctaccattctattgacagcattgtttccaccgccacctacacctattactttaatttgtgcacattcttctaattctacgtcaaagtttagcatcataaacccccttctctcatgattcaaagttatcgtatgtattaattatatcattttcttcttttattttgttaacctttaagtaacatattccacaaaaacgtaaattttcctttttaaatttcttacttatattgtcaaatattactctttaagtataaaataatttacgtatatattaaatgctctttaatttttacgttttttgttcataatattactaataatatatcgtctaattatagataagttattaaacaatctcataccaaaaactagtacagcaacatagtaaagagaaactcctaacttttctcctatataagtcaataatatagccaatatagcattacctatgaaaccagtaataaaaattacattatcatagttatcttcaaaattggattttatcgctccaaaaatagaatccattattgcaagaatagctactgacatatatatggaataatccatagaatatgtaaatggaatatagtaacctactactacaccaaatgctaatcctcctaaaacccacaacataaatcttcacctctttattttactttgaaacacaactacattacaatcctttttattaattttttttactttttctttatttttttgtatttttcgttttattttgcaaataaattcactttattcccattattttcctgaacttttatattaattccatatatatccttaagagatttagcatatgattctggagagtttatagctgcactcaataaatctatatctcctatagcttttattataaatggttgtccatatgtagtatcatttactgtaatagtagctcctgaacattttatcttacttgttgctagtactctttccccatttatagaaattgctcttgctccagccttttttaaatcatttaaaactctcaaaatatctatatcatgtataatcaaatcatttggattctgtccgtcttttaactctctctcactatccctcatagtaatagttatgcctggccctgtaacagttgaataaccacttaattctttaacttcttcaagctctttttgcataagtgtttggatagattcatttccattcttttttgcttctttatattcattcaaagtttttttgttgtttttaagagtttcttttaaattttttatttctttttttgtattttctacctcactttcaatactttcagtttgacctaatgttatgtatactctatttgggtctagtgattttatataagttgatatgaaaatgcctaatatgaatgctcctaatataactattttctttttcatactattatttcccctctgctttgtttatatcactatgaccatttatttctatattgtcttctttggtcacttttactttggcattataatatgtttctatttcccagacaataccatactttatattaagtgccgaagccaatgtatcagaatcaccaattgcttttattataattggttcttttatgacagtgtcattcatacaaagcttgtcttcttttaaatacatatatgtattaaaaactattctctggtcgtttatagatatggcacttgcttgtgctgaatttaatttatttatcattgacaataataaatcataattatatagtatactatcatttttatcagagtttcctaagtcttttgtagaatttatctcaatttttatgcctgttccttcaacatctgtatatccagctaatgtttcatatttttctatttctgacttaagtatgtcttgttctcctttattgtttttgcctctataagtctctatatctttcttcacactattaacttctgattgtagattctctttttctgtttttaaagatttaagttcttctgtaagttgctctcctcttttaaaagttgtcatccctctattttctatattaataattttaagttgtaaactaacaagaacacccaatacaacacttcctatgattatacttttatttataaatctttttttcaatatatcacttccttacaattgtctatccttctggactatacactgccaactttccatagttaagatttatagtccctccattagtatttttattttgcaggtcaatcagaattttacttaccctagatatattataatctaagttatcatcattagaaagtaagatttttatattacttcttgtaagcatttctatattgctttctttttttaagtttacataatttatttttctataaattccttcttcttttaaataatttaaagttttaaatacattctccttagttttataatttttaaattttatagatttattatcatcaacgctataatctacatctactatcaagtcttttttactttcattagaacctcttagttcttccaataaatttccttttttatctatataacaataattatcttcatcttttaatactgcaaatatttctttttcttttaaacttataattatcttattgggaagttttctttttatttccacattttctatatatggattttttataagtttatttttcatatctttaaaattgtatgcaaaaatattttcatttagatttatatttagttctttcattatatttgatttggtcaccctcttatttccaattacatctattttctttacatcaaataaatcactttttacaattatacatatacaaaaagataacataagtataaaaactaaaactatcatgacattattcgtatttaactttcttctttttttcaaatataatcaacccctttggttaataaatacacctttagagcttgtttttcctacaaaaaaattataatatttaaagtcaaatttttgcattttattacataacatccaaataaggtattaaattttataaataaatcaatatttcatcaaaataaacatagtatactacatactatttatatatttaaatctgtatacatacaaataaacccctaatttataataatttagaaaatctaatatattataaattaggggtaaatatttacttatcttttctttattcctattaccttagcttgaccttctatacttggagtcgtttctttttttatttcttttacttccttaataactttttccttttttgtttttttagaagttgacttttgtgttgaattgtatactttcattatctcatcatatataaggtctatggcttcaggcttacctatagttttacttgcatttgccatatcaactaaaagttctctatctcctaaaagtttaaatactgctgtatttaggctctctggagttagatttttttctaaaatagcaattcctgccccttgtttttctatactcttggcattatactcttgatgattttcagcagtataagctttaggtattattatagatggctttccaagagccgttatctcagctaatgaaattgctcctgcgctacctataaccaaatcacttgctgcaagtgcatttgccatatcttctaagtaaggcacaactttttggtatggtttaagatttatatcgctaatacttcccataaattcatcataatagcttttgcctgtagcaaatataaaagctatatcttcatttaccatattctttattacaagtctcattgcatcatttatttttcttgaacctccactaccaccatagcaaagtaccattcttttttcgtcacttattgatagattctttcttgcaatattttttcttgataataaaatttcttttctaactggatttcctgtaaaaactaatttatcttctgctgcctctggaaatcttttatgcgaatcttcaaaacttgtaagtacctttgtaactgttttagataaaatcttattagttacaccaggaaaagaattttgctcatgtattatggctggtattttccccatagatgcattaaataaaacaggtccactaacatatccaccagttcctataactatatctggtttaaatttcttaacaatctttcttgattgctccaaacctttaaaaagcttaaaaactctttttacattatcgaaatctatttttcgcttaaaaccttgaactgttacagtctttaattcaaatccatacttaggaactatttctgactctattcccttttccgtcccaacaaaaattatctcagcgtctggatgctcatctcttattttgtttgcaatagctatagctggatacacgtgccctccagttccaccgcctgataataaaactttcatcaaatcatcatctcctgttaattaattttgacatgctttgagatgtttaacactattcctacagctcccataaagatggtgagtgaagttcctccataacttataaatggtagtgctacacctgtagctggcattgatgatgtcgcaactgctatatttaaagctgcttgtattccaatttgtgcacctatacctataacaaccatacaagcaaatacattagaagtcttcaaagctattcttacacatctgtagactaaaactacaaatagcataataactattatacaaccaatcaatcctaactcttctcctattatagcaaatataaagtcattttgtggctctggtatataaaaatacttttgtttactctttcctaagcctagaccaaacaatccacctgaacctagtgcatatagaccttgtattacctgataccccttaccaagagggtcttgaaaaggatctaaaaatgatgtaacacgactaagtctatagggttcagcaattactaatgcagcaaataaagcagccccactccctatcatagcaaatacaattttcatatccattccagcaacaaatatcattacaaaagtaactagaattacagtacctgctgttgacaaatttggctgaagtattatcaacgcaaaaaatatccctggaactacgagaagtggtacaacaccttttgtcaaagattttattttatcataatttttttcaattaattttgcagttaatattattgtagcaaactttgcgatttctgcaggttgaaatgttaaagctcctattcccaaccatctttttgctccgtttgcttctatccctaaaggggtcaaaactaacaataataatactactgctatagctccaattgctgtagcatttttcttccaaaaactataatctattcttgatgtaataatcataactataaatccaagtacagcatatattacattcttttttagaaaatagtacgcatcattgtgtttaaatgaagattgtataaaacttgcactaaacaccataactattcctacaaatactaaaagcatagtagtgtaaaacactactccatcaaattcagtcttcatccttatgtcaatttgttttttcaaattttctttaggcatccaactaatctacctccattcttccatttaagtaagtttagaggtaagagattattttaaattgtttacattatctttgaagtcttttcctcttacttcaaaactttcatacatatcccaacttgcacaagctggtgaaagaagcactatatctccactttttgaaatttcataagaagtcttaactgcttcttccatatcttttactatatgtatgtcattaaatcctttatttttagcacaattttctatatttgatgcagtttctcctaataagaccaatgatttaacatatgactttgcagtttcaagaagttcatcaaaattacttcccttatccatcccccctgctataagtattataggtctatcataagactgtatagcttttatagtggaatctggattagttccctttgaatcatttacatatattacattgtctaaatttcttacaaactcttgtctgtgttccactcctttaaatgtcataagtacatcctttataacttctaaatcaattttgcagacatatgctattgctatagctgccatacaattttctaagttatgacctccaggtaaacttacatcatctttatttagaaatttgattttatcatctatatctattattatgtcattattttctaaatatactcctccatttacttttttagttcttgaaaagtaaattactttggcattgcatttatcagctaaagattttactacctcatcatcatagtttaacacacagaaatcctcaacagtttggttcataaatatatttgcctttgcttctatgtatttttccatagtatggtgtctatttaagtggtcctctgtaatatttaatattgcgcttactttaggtctaaattcatctatactctcaagctgaaaactgcttagttcagttactaacacagactcttcacttgaagtttctatagtatctattacaggatttcctatattaccaactacatatgtatctcgttttgctcttgaaaaaatttctcctaccaaactagttgtagttgtctttccatttgtacctgtaatccctataaaaattggattattcgatagtttaaaagctaattctacctcaccaattatatacttgcctgaattttttaatttcaatatgaatggtaggtctagtggtacacctggagacactacaaccatatctatatcatctacatcttctgggtgatgtcctaatatgtattttatgtcatttatagatttcaattcatcaagtatatttctcaatttattttcatcttttatatcatttacgattatacttgcacccaatttatctaaatgtttaattgtagatataccagtttttgcaagtcctactaataaaactttttttccttttaagtccatttttcattccccctagccctaaaatactgctattatacttatccaagctaaaacaactgttataatccaaaaaataaatacaactcttgtttctggccaaccacactgttcaaagtggtggtgtattggagccatcttaaagaatctctttcttgttgccttaaaatatccaacttgaatcaaaactgatagagcctccgcaaaataaattcctccaattataggtattataagcactgagttagttagaactgaaaatgctacaactgcacctcctaatgccattgaacctgtgtcgcccataaacactctagccggatatgaattaaatcctaagaaacctaaacatgctccaacagttgctgctgctaaaactgcgacttctgtatttccagcaatagaacttgcaaatagcataaagaatacagaaactattaatgttactcctgatgctaatccatctaatccatcagtcaagtttacagcatttactattgctacgattataaacatcattattggtatatataatattccaacatttatcacaaaatctgtaaatggtatcataagttgtgaagcacttgatgatgatgtatactgataaaaagcaacataaaaagataatgcaacttgaaggattattttttgatatgcttttagtccaagtgatctttttagctttatttttataaaatcatctaaaaagccaataaaaccaaaacctgcaatacatataagacctactgccatatcatgactaacttttactcttgtaagtccagttattagaattgcaacaatcattataattccacccatagtaggtgttccgtttttagctagatgtgtttggggtccatcatctctaactgtctgaccaaatttaaattttctaagcattggtataaatattggtcctattataattactattaaaaacgcaatcaatgcggtgtacgtaagctctgttattcctaacatcataaaactcctctcccttgtcaattaactcattagtttaagcttatttatttagatattcgactattttttctaatctcatgcctcttgagccttttactaaaatagtgtctcctgtttttactaattcatttaacttgttaaacacatcttctctattctcaaagtgatatatattggctgaattgaatcctaattgttttgcttcttctccaataaacactgaattttcacctatagttattataatatcagtattattcatagatgattttccaactaatctatgaccatactctgaaatttcacccatttctagtatatctccaagtatcgctacccttctacctttatatcttccaagtatctttaaagcagcatccatagaatctggactagcattatatgaatcattaattattgttaatttttcattttttattatgtctagtctcatttttgtccctttaaaattttttaaacctttttttatataatctaaagaaatatttagacacaaaccaactaatatagcagacattgcattatatatattatgttctcctattgttggtataaatatttcctcttttttcccatttattacacatataaatgttaaactatcctcttccatagtataactttcacaataaatatcattgtttttattaaagccaaatgtttttaacttatatacatgttctttttcttttaatgtagataaaaacttatcatctccatttacaattaaagtatttgtttcatcaaagtttgaagtaatctccatctttgctttcaaaataccctcttgtgaacccagtttttctacatgtgataatcctatattcgatatgactgcaattttaggatttactatatccactaaatattttatttcattgaatccagacatacccatctctattacagcacactcatgttctttatttagattaaataaagtcaatggaactccaaaatgattatttaagtttttttcattttttagtatatttaactttgcagatatggcagagtaaatcatatctctagtagtagtttttcccacactacctgtaacacctataaatggaatatcaaatttttctttatagtattttgaaatatctcctagagccaaagatgtatcttttacctctattaaatttatatccgaactttctaattttattccattactttcattttttataaaagttttacatccactatcatatgcaggcttcataaatgtatgcccatctaaattttctccaactatggctacaaatgcattttgggcacttgcctccctgctatctataactatatcacttacacagtcattataatctccatatattaacttcccattagttgcaagtactaactcttttattgttaagcactccattattaaactcctcctttaaaaccttagctatattctcttagcaacaaaaggcaatgtataccgttatatatacattgcctacgataactcttaactttataattatatactatatttctgtttttttgaagatgtttatgggtatatgttaattatctgttactttttagttttcaaaatatagggttatacttgagtcttcattaacttttactccaggttttgggaatatatcctttacctttgtatcttctggaagttctatatctgcatctaagtctggttttaacttcgcatcctccaatgcctttacagcatctcctatttttagatttcttacatctggcactttaacttgcttcttttcatactcagctttttcttcttctttatatactggtttaactcccaaatattttaaagagtcattcattatttctttcactattggtcctgctgtagtactaccaaatgcacttactcctgttggttcgtcaacaatagcaagaactactatttgcgggtcatcacaaggtgctattccaacaaatgaacatatatactttcctggagcatacttaccatctataactttttgagctgtacctgttttaccaccaagtctataccctggtatatatgctatctttcctccaccttcagttacaactgattctgcaatttctaacatttttttagatgtttctttagatataacacttcttactttttttggttttactgtttcagttatatttcctttattgtcagtataagattttaccactcttggttgcattaaatctccaccattagctattgatgatatagctgttataagttgtattggagttactgatatagattgaccaaatgatattgtagccaattcaactggtcctacatttttttcgttatacagtattcccttagcttctcctggtaaatctatacctgtcttatccataaggccaaatgattctatataatcatacatttttccaacacctaatctgcttcctaattcaacaaatactgggttgcaagagttttgtactgcttgtttaaattcttgtgttccatgaggtctgtaatgtctccaacatttaatctttcttcctccaacagttacactacctgtacatgtgaatttttctccatctttaattactccctcttcaagagcactggaagatgtaataagcttaaatgtagaacctggttcatatgtatcacttactgctggatttctccacatttgataatagccttttattttatctttatcattatatttttcaagttcttcttgataatatggatatattggcgttcttgagtcattagggtcataatctggttttgatgctaaagcaagtatatcacctgttttagggttcatagctattgcagtaaccttttttgcattatttaactcataagctttctgtactgctttttcagtatagtgttgaattacttcatctatagacaacacaagaccattaccttgtacaggctcataatatttttccattccttgtggtatttctcttcctgaggcatcagtacttactataagttttccaggctttccttttaactttttatcatattgcatttctacaccagatatacctgttgcatctgaagaagtatgtcctaacacatatggcgcaaaattcccatatgggtaatatctttgattatcttctgctacccatattccacttaatttagcatctcttatttgacttgccttatcatcatctatccatctttttacttttacaagagccatattttttttgcttattaaagcgtaaatatctttataatcttcatccaaaatctcagctaccttttcagctgcttcttttttatcttctacttccacaggtttacaccaaacagtatacttagttacacttactgctaattctttcatatttctatcatatatagttcctcttttgggttctattggtatatctcttgtttgttgttctagtgcttttgtactcaaccaatttcccttcataagttgtaggtacccagtcctaataacaaggcaaaaaaacaatgcacatgctagaataagaacgagtaccagccttttcttacttatcctctttacttttctcaaatctattccccctagttatccacatctatatactttatttgtccatcttttggatagtccatattgagcaattccttagcctttagctcaatttcttttattgatgttttttcagtttcttttgcctttagttcctctaatactatctctttttttcttaaatctttttgtaaataatagatatcgtacttcatttccgagatttttgaataaccacatagattcaatattattactgaaaaaattgcaatcagtaaaatgcatttagctcctatttttttcttatttctctttttataattattcttttttttatttttatattcatttagattatgtattttataattttttttcaaattctcaccccgatagtatatagtttaaattttcctctatactatatttgttattaatcatatttcttcctctaaaatttcatcgctaaattaatacactattacacaatctaattgtatttttttctatacacaacaaaaacctataaattcacttatacttttatatgaatctataggttagatattaatttctatttatttttatcacttctagtatttttagataatttcttccataaatataatatgtaactaactatctactctctgattcctaagttctccattatattacttaataccatctatatctatatttttatatctaaattttcattatatatctcaataacaaagaacatttcttatagtgttaattgttttttaattgctttaccagttcaacaaaatatataatactttttaattaattatagtaatcttattttatatataagattattctttagccttataactacttatattttttctgctactcttagcttagcacttcttgaacgtggatttacttctatttcttcctcactaggtaatataggttttctagttattattttcacctcagattctttatcacattggcatataggtaaatgttgtggacatatacaatctgatgctaaatgcttaaatgcatttttcactattctatcttctaatgaatggaatgttattatacatattcttccacctttattcattatagaagaagcatcatttatcatctttgtaattactccaagttcattatttacttctattcgtattgcctgaaaagttcttttagctgggtgaggtccatctattctagctttcttagggatagcttttttaattatatctactaattttcctgtagtttctattggtttgtttgctctttcttcaactataaatttagctatacgcttagcccagttatcttctccataatcttttattatcttagttaattcatcttctgtataagtatttacaacatcatatgcagaaaactcacacctaacatccattctcatatcaagtggtgcatcttgcatataagaaaatcctctatcagcttcatcaagttgatgagatgaaactcctaaatcagctaatacaccatcaattttgtaaactcctattttttctaattcctcttttatattttcaaaattgctgtgaacaaacttcactctactttcatattcactcaatctctcttttgctgtgcttatagcatttttatcttggtcaaaccctataaataatcccttatctgacagtttttttactatttctttagaatgtcctgctcctcccatagtacagtcaacatacacgccatctggctttatatttaaattctctatacactcatttaaaagaactgatacatgatgaaattccatagttacctcccttaaattcactttttaaactattcttcactaatattatgtttatttttctttgataaataaacatgtgcaattatgccaccaataactccaattagacttataacttgtgccattctaagtggtcctaacattaaactatctgttcttaatccctctataaaaaatcttcctattgaatataaagttatataagtaactataacttgaccttcatattttttattttttctaaatagtaataaaactataaatattccaaaatcccatatggactcatataaaaaagttggatgtacctttactccatcaaccattattccccaaggtaaattggtagcacctccatgtgcttctccattaataaaatttccccatcttccaatagcttgtgctaaaggcattccaagtataactgtatcagccatttttaagaagttaatatttttaatcttagtgtatatataaccagctaatattccaccaattaaccctccatgtatagcaagtccaccacctctaaaattaaaaatttgagacatattttgagcatagtaactccaattaaatacaacataatagattcttgcacagattagtccaactggaattgctattatagctatatttaatacatcatcatctttaattcccactctttttgcttcttttattgctattaaagttcctaaaatcattccacatgccataagtattccataccacatgatgtctatgccaaacagtgtaaatgctactctatccataacgtcacctctttgtattaattgaaaatatttccaaagcaatatgctataattacaattaattgtaattatactaaattatgataacacattaatgttaattctacaaaaaatattaaaatttattctacaaatccctacactatattatactaatataattactataaaattttttaaactgaatctctcatgactaaagttacaagtgtacatagatattttttaatcaaaaagattgatgcatatatacatcaacctcttctattccttatctatagctcttaaatttttacctcaatttatataaatatattttataaatttgttttaccaaaataaacatttaaaaacataaataatacttaattagttattcttattatgattaagtttctatttaggttctacaatagaaataacacaatactcttctttaaaatgctcttttaatctttcttcaacttcctcaaaagtaatatctttaataacatctaaataatccaatagatttatatccttaaaaacataagatataaaactattacctataaagtttatagaatcaaagcacttaataaatgaccctatttttttctttttagttctctcaaactcttcttttgataatccttctttttttgatttttctatataatcaagaattatttcttttacttttttaggctctttagaatctccagctattatgctaaaagcataatccacttgagacgaaaatccagctccaaaattttcatttattaaaccttgcatatacaaatcttcatagagcttacttccttttttaaataacatccctacaagtatatcagttacaatctctttacgtaaaagttctttcccttttaaaccaacattactatctttaaaacctatgttgaacataggcatagatatagggaatttttctataacctctttttcttttacactttctggttcttctggataaaatctttctatactcttagagagtttgtctactttgtaattgtttgactttttagttacatctataactttttctacatctaagtcaccaacaacaaataaagccatatttcctggattatagaaagtattataacatttatatagctcttccttagttatcttatatatactatcaacagtacctgctatatcaattctagcaggataatttacatacattgccttcaagcaattaaagtatacattccaatcagggtcatcattgtacatttttatctcttgtgctattatacctttttccttttcaacattttcatctgtaaaataaggtgtttgaacatagtcaattagatgttctaaactctcataaaaattttcagtagcagaaaataagtaggctgtcattgtaaaattagtaaatgcatttgcatttactcctaattttgaaaatttatcaaatgcatctcctccatcaggttgctcaaacatcttatgctctagaaaatgtgcaataccttcattcactctaattttcttatcttctccaattggtacaaattctaagtcatttgaaccataattagtagccaaaatagcatactttttcataaaaccccttttaggcataaaatatacatctaatccattttgcaatttctcataataaacttcttctttcaatatatcattaactattttttccatagacatctcctccattaatttctcaagaagtatacagtatcaagctctatattttttatagcttcaactatatctttttttgtaaccttttctatactagatattatgtcttgtacttcagaatttgtctttgccatagactgagagaaaacaaaatcagacataccacctatattatcagttatagatttcatagaattaactaaagcaagtttactgttttctaattcttcatcagatatatcacctgcttttacactttctacttgtttttttatcaattctacagctttatcataatctttagtttctataccagatgatataaacatgatacttttatacttctctattgaagagaatatatagtaacataaactttctttttctcttacattaacaaataatttagagtgtggaccaccacctaagacattgctcccaactactaaagcataatatttatctatgtctgcataatccacatttgctctataacccataactaacttaccttgagttatttccatttgttcatctataacttttacctcatccacattttttataaaatctgctcttggtatatttataatttcttctctttcaaattttagatttttacttattatatctacaactttatcttcatcaaaattaccttctacaactatatctataggtgatgttttaagtatgtttttataatgttcatataactctcttgaagttatactatctatttcatcttcataaccaaattcacttacactatatctctctcctttacacatagcctcaatacatttatcttgcgcatattcctttttatcatttattattgattgtatcttttctcttaaattctctttttcaatatttaaatattcttctttaaacccaccatctacaacaagcgtattatttattacttcattaaaaaattctactacttcttcaaatatactctcatctaaatacttttcacttatgttaattactttaaaactcaatacttgacgttctccacgttttacagcatcagctcccatagatgaaccatataaatcatctaatttattggatattgctctagcactaggatatttagcgcttccacttgctattattgatggtattagagcattttttgtagtttctttttcatccaatagtctctgaacatataaacttataagattcgatttaaacttttctgtttttatcaaagtaagattaatattattacctaaatttattatttttttagtattaaccatatgtacctcctatttttatttaaacatcaattttaaaattgaaatttatttattttttaattatatatactcacatataaaaaccttctatttaattatatcctttttattattttctaaaagcaatatttttatttaaattaaatgcaaatattatttaaatcaatatgctttaaagtctagtttacaagcttgatatatatgatgtataatcaatatgtatgtctataattaaaacaattttgcaatcctatagattgattgtttaaagttatataaagaatataaaaaagaataagagagaggacgattaatatgaaattaggtatagttggtttgccaaatgtaggtaaaagcacactatttaacgcaataactcaagcaggtgcagaatctgcaaattaccctttttgtacaatagacccaaatgtgggagttgtatctgttccagatgaaagattaaacaaactacaagaattatataattctgaaaaaatagttcctactgctatagaattttgtgatatagcaggtttagttagaggtgcttctaaaggagaaggtttaggaaataaattcttatcacatataagagaagttgatgcaatagttcatgttgttagatgttttgaggatgaaaatgttgtacatgtagatggctctgtagacccacttcgcgatatagaaactataaacttagaattaattttctcagatatagagattcttgaaagaagaattaataaaactcaaaaagctgctaaggctgataaaactttaggttctgaacttgatttattaaaatcaataatgtctactttagaagaaagtaagtgtgtaagaactatggaatttacagaagatgaacaaacattcgtaaattcattggatttacttacatctaagcctgtaatatatgcttcaaatgtatcagaagatgatttagctgataatggagaaaataataaatatgttcaacaagttaaagcatttgcagaaacagaagatgccgaagttgttgtagtatgtgcacaaatagaagcagaaatttctgaacttgattctgctgaagaaaagaaagagtttttagaaacattaggtcttgaacaatcagggcttgataagcttataaaatcttcttatgctttacttggtttaatttcattcttaactgctggtccaaaagaagttagagcatggactataaaagttggaagtaaagctcctcaggcaggaggaaaaatacattctgatatagaaagaggatttatcagagcagaaacaatagcctttaatgatttggttgagcatggtactatggctgctgctaaagaaaaagggttggttaaattagaaggtaaagaatacatagttaaagatggagatgtaatattatttagatttaatgtttaaaatgattaatcatatacactttgactattatatataataactaaaaaactaagattataataatacaatattatcttataataattatatagaatttaaaaataaaagaagagtatttcaaatgatttgtataaattattatgaaaaactctttttttgatataataaaattacttacatatataacatttaaatttataaattatctttttattttttaaaatatgtataacacacctatagaaattactattattactatctaaagtattttgctataatcccatatactcttacctcaaaaacattcaaatggaaaaaatactacatattaataaactttgcccaataattcctaaaataatatcctaacaatgatttatgtttttataatagtatatttttacataaaaaagtgaacattgattaacaaagttcacttttttataaatttttatgttataattcacaattttatttaatttgtttcttttctatttaaactatatctatctaatattaatttttcatattcttctattggcattggtctagcaaataaaaatccttgggccatatcacaacctataaaccttaaaaactctgcttgctctacagtttcaacaccttctgaaacaacttttatatcaagttgctttgccatttgaacaatacttgaaactacaatttgactcttttttgcatttcccactgttataaagaattgcctatctaatttcaatacatcaattggcatatctttaagcatatttaaagaagaataaccagaaccaaaatcatccatagaaattttaaatccaacagatttcaaagtttgcattattttaaataatatttttgtattgtcaaatattgcactttctgtcaattcaatctcaattaaatttggttcaatttcatattcttttgttattctttcaagctcagaaataaaacctggattctcaagatgtactcttgataagtttattgatataggaaatgtggggaaattttcattttcccaacgtttaaaatttttacaaacttgggcaaatacaaacatatccaattctgttataaaaccatttttctcaaaaataggaataaatacacctggacttattagaccttttttgggatgttgccaacgtacaagcgcttcagcacctacaattttagtagttgataaatcaaccttaggctgtaaataaactttaaattgttcattttttaaagcatcatgcatttcttgttcaatatcacgttcttctatgagagtttcttttaaattttcagcataaatctcataaacttttaaatattttctttttactgtagtttttgcaatcatagctttgtcaagacaggtagaaatatttgtttctccctcttcaacaaaatatacacctatggatggaattaaattgagttctactcccaaacttgtttttatcattgacaattttttacgtataagttcacatatttctataattgactctctattatttttcttttcaaatattatagcaaaattgtcatttgaaattcttgaaaatacagattgctctttaaatatattcttaattatctctgctatttcctttaatactctatctccttcttcatacccaaacctatcatttactagcttaaacttatctatatcaaaataaattaaaactagattctttttctcatgagaggataaaaattttcctccttcaagattaaatttatttgaattgccaatacctgtaacgttatctttaaaagcaaattcttccaatttttccttactctttttatgtataaatagtatataaattgttaatgccgtaaagattataatcaacactacacatgctgataatgtaagttttataatagcgtatgatttctcagatatagcagttttaggaacttcagaaaaaagataccaatcattgattcctattggggcataacttaaataatatccttttccaaacatactataacttaatgaacctgatttaaagttttttatatttgacttcatattattgatactagattttgatattgaatcacttctgccaatgtaagaaaataaattttctttagtagagttggcgtttttgctgcttggatttaaaacaatattaccattacttctagctatataagaatatccttttccattaaatgtaggtacagaaagtattttttcatacaacttcgtactatgtgtggcaaatataactcctttaacctcattatctttataaattggcacagaatatacattaatattactattggtatttttatcatcttctattacatcttttaatttttctgttataaccacttctccttgcattgattttaagaaataatctcttttagagaagtcttctatataaccatctgtagtgtatgctgtaccatttggtaaaataactcccattcttttaaatgaactattaatagcttgtctttttagtatagaaaggatattatctacttcaaaagactcttctccctcaataaatattgaaattgactctagtaactttatatctccattaatttgtttttttaacacattgacgctttgatttgctatttctgaaagatattgattcgtttcttcacctaatgtcttattcaaccttgaaccataaatcaaacaggaaattgtaattactaagatacttatgacagcaattatggacaaaccatacctattattttttgcatcacttaacattatgcttcctgcctttctcgaatctatgtatgtataatcattatcttatgacaattattgtaaacattttataataatacttatttttccatatttactgtaattatacaaaattataaactttattacaacaataaattaattaatatagatattagggtttatattattgcattatctattttacaatcatttacatataaaaaaatgtaatatcaaagtgaaacttgatattacatttttgttcttgtattttgtttaatttttatgctacattttacttaaacactcatttgcaacttctttatcatcaaaatgatgcttaactttacctataatttgataagtttcatgtcccttacctgttataattacaacatcatccttttttgccatacttatagcttctgctatagcttgttctctatcaacaacaacatggtaattttcttttttcttgtcaattccttcaagtatatcttttattattgcctctggttcttcagttcttggattatcagaagttataatacataaatcagaatatttttgtccaattgctcccatcaaaggtctcttttcagtatctctatctccaccacatccaaacacagaaattatttttccttctgcaaattgttgagttgtctttagtacattttcaagtgcatcaggagtatgagcatagtctacaattacacttatacctttatcatttggaactgtttcaaaccttcctgatactccattagaaagtctaagaccttctttatatattggtttaggtatgccaagtacatagcaagcagctataactgctaaagtattatatactgtaaacattcctggaactggtataaatattacttcttcatatgaaggtgttattaatctataagatactccatccgaatctgattttatatctctagccataaaatcagccttagtatcaacaccataagtgtaacaaggtacatttataccttttatattttcatatatcttttttccaccttcatcatctatgtttattatatttgccatagtagtcttaaaaaataatttttcttttgcttttctataatcctctaaatctttatgaaaatctaaatggtctggtgttaaatttgtaaatatgcctagtttaaagtctgtttcatcaactctatttaatgccaatgaatgtgatgaaacttccatcgcacagtagtcacatccattatccaacatattattaaaatgatattgtaaatctatactttctggagttgttgaattggaaacaatgtctttttctccgtcaaaaatttttatagttcctataagtccaactttattcttatttaaagttaatatctcatttagtatagtagttatactagtttttccattagtacctgtaactcctataacgttaaatttctgagatggatgattataaaaattatcagctacttttgccatatcttttcttgtatcttttacctttataaatgtacatccttttatttctacatcttcttcaacaagaaatgcacttgctcccttttctatggcatcttttatatacttatgaccatctgacacaaatccttttatacatataaataatgtaccttttgtaacctttcttgaattatattgtacattattaatatctatatttaattcacccttgacattgattatatccaacccctgtataatatcatttaatttcataaatgctttcctccctttaaactctttctgctaaaattacactacatataatattatattaagaattttttactatgtgaatggttaaaaatgcttgaaatattgcaaaaaatgctctataattttctataatataactgaggaaaggtcttctataaaaactatggataataaaatcgggtacttaaacgataactttaaaatatttaatattagagataaaaaagatatacaatttgaataccataatcatgattttaataagataattatatttataaatggaaatgtaacttattttgttgatggtattccctataaactaaagccttgggatatactctttatcagcaataatgaaatccataaaccagttatagattcaaatgtcttttatgagagaattgcaatatggattagcccagaatttatgaaaaaaaatagtgatgctactagtgacttagaaaaatgttttaaaatagctacggagaataaatgcaatagattgcgtttaaatatacatgatattgaatctattaagagttttattgagcaaataaatatttccgaatccaatactgaatttggaaatgaaatattgagaaatgcattatttatacaacttatgatattcttaaacagaattttcctaaaaaatgaaaatatggaatcaacagaagacgttttttatgatgaaactattaagaaagtattaaactatataaattcaaatatagatgataagctttcaatagatagcatatcgtctgaattttttataagtaagtattatcttatgagaaaatttaaatctcatactggaacgtctatacacaattatatagttcaaaaaagattaattttagcaaagtcactaataaccaatggttaccttatgagtgaagtttgtaataaatgtggattcaacgattattctagttttgtaagggcatttaaaaaaaactacggtgtatctcctaaaaattatataaacaataaaaatcctttagatattactcttttagatgaatagataatttatgtaaattttattttaataaaaacttgaagtattagtgtatttatcttactaatacctcaagttttttaatgttttaaaatatatcaaaatataatgatatatatttctattacttaaaatatatattaaataaattgcatgttaactgaacctatttatatatttattaaatctcacataacttttagttatactatcatatagctatcctattttttcaatatcatatcttaatatacttactctgttctcctcttttgctgtagttattccttttttaatgcttaatttctgattttgttctaaattcgtaaatactacaggacttattgttgatagacaatttttttcaatatattctaagtccattttaactaatttttctcctgcttttacttcatctcctacattcacaaatacttcaaatccatttccttctaaatttacagtttctatccctaaatgtataagtatttctactccactttttttggattttattattattgcatgcttagttggaaatataactccaatagttccatcaactggtgaataaatcaatccatcactagatttaattgcaaatccatcccccatcagtttacttgaaaatacagaatctggcacttcttctatatctaatatctctccatttgttaatgaatcaatcttttctactaaagcattttccatattggcaacttccatattttttttcactttatttttatcaacatttttagtaacagtactttcaacctttgtttttccctctattatatcttttatatcagactttattgaatccgattttggtccaaatatagcttgaacattgttgccaataaccataacacctgctgctccaagtaatttcaatttttctttatctactttatttatatcatttacaaccaatctaagtcttgttatacacgcatctaggctctttaagttgtctttatttcctaaagcaattaaaatctctgatgctaattcattcttagacatttcaatgacttcagcgttagtttctgactcatcttctcttcctggtgtctttaaattaaattttcttatcataaatctaaatacactatagtataatactgcaaaaccaatacctaccaagatagccaagtaccatggagttctattaggaagaacaccaaataataagaaatctattaatcctcctgaaaatgtgaatccaattttaactcctaataattgcataattgcgtatgataaacctgaaaataaacaatgtattgcaaataatactggtgcaacaaataaaaacgcaaactctattggctcggttattcctgttaaaaaagaggttaatgctgctgatgccattatacctgctacaaattttttcttttctggctttgcttcatgcaccatagcaagagctgctgctggaagaccaaacatcataaatggaaatgcacctgtcataaaagtacctgctgtgaaatttactccatctttaagttgagcaaagaatatcttttggtcacccattacaagctcaccagctttatttacatattctccaaattgataccaaaatggattatggaaaacatgatgcaaaccaaatggtattaatagtctttccaaagaaccttccataaatgctgctagtgtttgatttgcttctataacattttttgagaaactaagtaatccctcttgtattggaggccaaataaaagacaatataattcctattgctatagcaactaatgaagtaacgattggtacaaatcttttacctgcaaaaaaacctagatactgaggtaattcaattttataaaactttttataaagataagcagccactatccctataataataccaccaaatacccctgtttgaattgttggtattccaacaatacttgcatacatagaattgtctaccatatcttctgtaacacccgccataacacccatagatgtattgagaattaaaaaacctactatggctgccaatgctgcaacaccttctccttcagttaaaccaacagctaccccaactgcaaatataagtggtaagttattaaatataatttgacctgaactttccattatacttattataagttgaaatgtaggattcgccaaagctggaaaatgagacaacaatgcgtctcctgctaaagcattactcacgccaagtaatatacctgctgcaggaagtaatgcaactggtagcattagagattttcctactttttgtaaaacaccaaatacttttttcatttacttttctctccttattattttatatttttttaaataaaaaagacttaagtttataaaaagttacattagtatacttaattctaaaattaaacttatgttaatataaataaacctatattaacctaatttcagaattaaaaataaactattataatttttttataaacataagtcttgcctgcattatcagtaacaatcttaatgttttaaaattattattttatattaaattttaaataatatattaaaattaaacataatatattaaacctatacattctgtattaaactactctttattataaattcagtacagatataactcttttgatatgtaatgttaaataaagtagttcatcttgacttacatagtaatcataattcttttctacatgagtttttattttatatgcacaatcataatccttttcatactttactttaattatatctataatttcattatttgtatcattgattttttctttttttactaatcgttttgcaaagaattttaaatgagtcaaaagcctatcataatttatatcatcttctttaaattcaactctataataatatcttataatatttagtatgtcttttacaattttagtaattaacagtgattcctttgaacttcccttatagtttgaatttactatatgcattgctataaaaccagcttcatctactggaaatttcacatcaaattctttatttatataatctacagcccatttaccaatctcatattcttttttatgtattctttttatctcatgtagtaaatcattctttatagttatattttcatgatatcttttaattgcaaatgcaatatggtcagtaagtgctacataaatatattcataaagcttagtattcaaattctcctctgcataagcaattatttcagtactaatctcaaaaaatttctcatcaacctggcttgctagtttgctaattttatctaaaaagctttcatcttgtattacaaaagttctttcaattttacttttatctatttcttgacctttctttttttgaaacccaatcccacatcctgttagtattaattctttttttatattttcatctaaaactaatacaacattattattataaatttgttgaataatcataatcaatatctctcccaaaatacaatttcccttattcataaaaaaatacctaaattaagatacaattcacctgtataccttaacctaggtattgcctgcttaccagtaacaatccagcttgttaattcttatatattgtattcaatttatggttttattctattataaataaatatatatgtcaagtaaattattgaaaactatttcctattttttagtattatttttaacatcaaaaatcaaattttattccattatatttatgattctatcatcatcatttaataaagattcaccttcaagtatactcatcatatttttaggaaaatttaatccttgtgtgattgattttactgctactaaatcagttgaagatattactgctgccaaagcaagtgaaacagataatggcatcctaggaataagaaaatgtataaagattccacctgcaaacacggttatcaaaactaaaccaaatgcaagaagcaaaattggttttctaagctctagtaactcttttcttgatacattttgtccttcactgaataataatggagctatgatacatattacaaatatttctggattaaatgaaaatgataatttaaacggcaaaatagacaatataatccctagtacaatttgatatattgcaagaggaatattactccactttttgctaaatacagttgaaatctttgtacaaaccaataatcccaacaatgttactaaagttgacataactacctctcttttcaataataatattataaattaaacttatatatcaactaacttaatattaacaacatgaaatcccatcttaatcaaaaaaattttcagtttattctattattcttattatatacatcaaatttaatttttgaaatatctatactagatggcatgcaacaaaatgatttcttgatatttcttttaaaactggaatctcttttttgcatatttccttacaataagggcatcttgtatgaaacttacatccacttggtggatttgttggagatggtatgtctccttttaatataattctatttttcttaattgtagggtcttgtactggtactgcgctcataagtgctcttgtatatggatgttgagaatgtaagtaaagttctcctttagttgcaatttctattatagaacctagatacataacacaaactctatgtgcaatatgatttactacactcaaatcatgagatataaataaatatgagagtttatatttatcctgtaaatccataagtaaatttataatttgagattgaatagaaacatctagtgcagaaacaggttcatcacaaactataaattctggatttaatgctaatgctcttgctatacctatcctctgtctttgacctccagaaaactcatctggttttctatttaaatggtacttagaaagaccacaactttctacaacatttaatatattatcttttatttcattctttggcactaaattatgttctataactgcctctgatattatttgttccacatttaatcttggatttaatgaactatatgggtcttgaaatatcatttgcattttgggtcttaactttctaagttcttccttctctaacttatatatatctacaccattaaattcaactttaccttcagttttttcaattaatctaaggatggttcttcctgcagttgattttccacatcccgattctccaactatagccaaagtttctcctttttttaaatcaaaagaaattccatctactgcctttacacatttaatttccttatcaaataatccagatttaacttcaaagtactttttaagaccttctacttttaataaactctcttcttttttcaattatatctcctcctttttatataaccaacatgcaatactatgaccactattcaattctattaaaggaggtatctgagttctacatttatcacatactttttcacatctatcactaaaataacatgaatctggtattccaattggatttggtacttgtcctggaatcgaatacaatcttttatctttgttttttccaagaacaggctttgattttagaagtccaatagtataaggatgttttggatttttaaataattcaacaacctctgccacttctataattttaccagcatacatcactaatactttgtcacacatttctgcaactactcccaaatcatgtgtgatcatcattatagatgtgtttaatttttcttttatatttttcattatatctaaaatctgagcttgaatagtaacatctaaagctgttgttggttcatcagctataagtaattttggattacatgataaagccatagctatcattattcgttgtctcataccacctgataattcatgtggatatgaattatatatttcttcagctcttggtatttctaccagttttatcatatcgattacctttttcttagcttcttcctttgataaatcttgatgtatcataataccttcaatgatttgacttccaacagtgaacgctgggtttaaagatgtcattggttcttgaaaaatcattgatatctcattccctcttattaccataagttcatcttcattcatctttaaaatgtctttgcctcgaaagattatttctccaccttctatttttgatgttggaagtaacttcatcaaagacatggctgttacagacttaccacatcctgattctccaactattccaatagtttcaccttcatttatattaaaacttacttcatttacactctttacaatccctttatctgtatgaaaataaacttttaaatctttaacctcaattagtgctttactcattattttctcctctcagcaaaattacttaaaataacatacaccttttgattgtattttataaaaatttaaattacaacattttcttacattttattatttttttctattaattataataatataatagttaatttctatatatattgatttaataatgattactattatacaatgaaaaatatgtgttaaatattattttatggaggttttataagaatatgaaatttaaaaaattggcatcattaatcttagtttcatcattaatgcttacatttacagcctgtgcttccaatgataaagacaagtctagtggaagcaaatctggtggaactgttgtaatacctatggcaagtgacccagatataatcaatggagcttttgcaaacgttaaagaagactctcttgcatcaaatatagtttatgctcctctttatacttatgaaaaagggaatttagtaaattatttagcagaaaaagtagattttaaagatagtaaggaattaactataaaattaaaatccaatttaaaatggcatgatggaaaaccaataactgctgaagatgtcttatttacatttaatacagttttagacgaaaaacaaaattcaccatcaagacaatacttattggtgggtgaaaaaccagttaaagtagaaaaaattgatgatttaacagttaagattactttaccaactgcaagtgaatctttcttatatggtatatctaaaatttctccaataccaaaacatgtatttgaaggagaatcaaatatagctaagtcagaaaaaaataataatccagttggttctggtgcattcaagtttaaggaatggaaaaaaggtgaaagcatagtatttgaaaagaatgcagattattttggtggagaacctaaggcagattctatagcgctaaaaataattcctaatgaagcatctcaagaagcagctttaaataatggcgaaatttcacttatgaagacatctgctgaaggatatgaaaaggcaaaatcaaactcaaacttacaaacttatacttatagtgaagaaagattaaactacattgtatttaaccaaaatatatcaaacatggctaacaaagaagtaagacaagccttatcatatgccttaaatagaaatgaaatgatagaatcagcatatggaaaagaaggttctgtacctgctaaatctatattagttccagaagcagacttctatacagaagaaggtgttgaaggatatgaccaagatacaaataaggctaaagacttattggataaaagtggtgttaaaattgataaattaaaaataggttataacacaggtagatttgggcataaaaactatgccttagtagctcaacaagagttgaaaaaaattggtatagaagctgaaatagttccttatgaaagtaaggcattctttaatatactatttagtaatagcactgaatgtgatatgtatgtaaatggttatgcttggggattagaaccaaacccatatagaggtatgtttgaaactggtcaatattgcaaccaaactaaatattctaatgctgaaatagatgctttatgggaaaaaggatttactgagttaaacaaggaaaaacgtaaagaaatatacaaacaaatacaacaggatatatctaaggatgcacctatttacactatagattatgaacaaaatttaatggcagctcaaaaaaatctaaaaggaataaaagatgctaaaccatctcctgcaatattatttgaagattggtctaaactgtatgtagaataattgatgtaaaattttatattattaattagaaaaggagatgtctaaaaataatattgttttattattttaaaacgagacatctcttttaattaggagaatttacttatgttaaaattaatattgaatagagtaaaagttttaatacctatgttaatcttaatatctatattatcatttggacttttagaattagctcctggtgacccagcagatgcatatataaatcctttaatgtcttcacaggatattgaaaatataagggttaatatggggcttgataaaccagtatatataagatatttaaactggttgaaaaacactttaagtggaaacttaggtatttcttatataaaccatatgcccgttacagaacaaattatggaaaaaatgggaaatacatttattcttatgggtacttctttgatattttcaatattggtagctatacctcttggaatatttttagctgtaaataaaaattcaataactagtaaagtatcatctgtttttaattatataggtgtttctatcccttctttttggataggtatgatactcatttcaattttttcagttaaacttaacattttcccatcaggaggtatgcatactattggaaatgatagtattggagatttagtaaaacatttagttttgcctgtaataactttaggtctatataatactgctatttttacaaattatgtagaagctagtgtaaatgaacaattaaaaaaacaatatgttattacagcaagagcaaaaggattatcagaaaaagtcatactatttaaacatgtcttgaaaaattcactgacatcattggttacaatcctaggcatgagtatacaaaaattagtcactggtgcatttgttacagaagtagttttctcttggccaggtatgggaagattaatgattgattcaattttttcaagagattatactgtaattatggcaataactatgttatcagcactatttttaattttaggtaatttagttgctgatatactatacttattaattgaccctaaaataaaatctagcaaaggaggattctagttgtgtttacaagtatcttaaaaaaattaaaaaaagataaatcctttgcttttgcatgtattactcttagcataataatcatattaattatagcttcttttatattaaatatagactctaatgcaattgatactacttctaaacttcaagaacctagcttaaagcatatctttggtacagacgaacttggtagagattacttctctagagctctttatggtggaaggatttcacttagtgttggtattttatcaatgcttatctctgtagtatttggtactgctgtaggtgttattagtggatatattggaggtaagctagaccaattcttgatgagattagtagatatgcttatgagtataccaagtttcttagttttgattgtattaaatacttatctaacacctaaagtttccactattatactaattattggattcttaagttggatggaagtttcaagaattgtacgtggcgaaacattaaaaataaaggaaaatgaatactgtttagctgctaaagctactggtatcaagactagaaatatactattaagacatatagttttaaacttaaaagagactattgtagtcgctggttcgttaaatattgctaatgctatcttaactgaatccgctcttagttttttaggtcttggaatccaattacctcttgcatcatggggtaatatgcttcaagatgctcaaagacatatttttgacaagttatatttagctgtatttccaggattacttatatttttaacagtcataagtttgactataataagcaaaaaattttctagtaatacttaacaaattttatatagaaaataaaaacagtgattatctaaagatatacactgtttttatttttcgtttaaaaaatacatattttgtatattataactttaaatactactctaccatgttatgtaaagcctattattgctctcaaacatatagatgaaaaactaatagtttattgtaataaaaattgatttatttatttgttattttaataacatttttaagagttctttttactaaagaaatctataataaatttaaatacatgttggtctacatggctataacgttcttttttaggtctacatagtataactttccatgtaataggatgattaaaaggcttttctataattttgctattttcaaaaaaatcatgaactggtgatggtaaaattgttataaaatcagaatttgtggttgatagcaacaaaaaatcccatgaaccagacattatatatctttttaacttaacattttcatcagtaaatttttgcattagcttatgatgtatcataaaagtaggattaaatattgcaagtaattgctcattcaaatcgttccaatctatcttatccttcttagcaagtggatgatttatatttaaaaatgctgtaagttcatcttcttgaagcacatgttcagttactacacttttatcaattttatgtggatgtaacagtactgcataatctagttcctgcaagataagcattctatttaagtcatatgcacccttctctactatatcaaattctatatctggattatttgcaactaactgtgcaactacatctgaaaatgctattccaagtataagtggaggtattcctattctaacttttcctttaaattgaactgaatcttctcttaaatcttccatcatatttttgtattcatttataatatgttctgcatttacataaaatctttctcctgctggtgttaacccatttaacctacctttatacctttcaaataaatatacatcttcactttcttcaaaattttttataatttgacttaatgctggttgagatatgtgaagtgtcttagatgctattgataaattaaaaccagatttcactatttcaacaaaatatttcaactgttttatatccattttaaacccccttccccaaaagtataatttagattatattttttcttctaatgatattttataggaaaatcaacataatttcattaatattttaacaaaatatttttctaaatctactataaatttttatcctataaatttttcttatacactatataaaaaattagacttagacaaaatgcttttttcgccgtaatctataattagaaacaggaaaacctaaagcattaggaataaaagtaattgaaatacttaaaaacaagcttgtattaaaaaagtactttattatagtgttccctaatttctttattcagaaaatttttaattatcattcaagaaaggtaactattagatatgaaagatgtagtaatcgtatcagcagtcagaacacctataggaagttttggaggtgtatttaaaaatacttcagctgttcaacttggaactatcgctgttaaagaagcgatatcacgtgtaggacttaatttatctgaaatagatgaagtaataattggaaatgttcttcaaacagggcttggacagaatgttgctaggcaaattgctataaattcaggtataccaaattctgttccaagctacacagtaaataaattatgtggttcagggcttaaaagtgttcagctagctgcccaatcaatcacatctggtgaaaatgatgtggtaattgcaggtggtactgaaaatatgagccaagctccttatatcgttccaactgctcgctttggtagtaaaatgggtgacataaccatggtagatagtatgctaacagatggccttattgatgctttcaatcagtatcatatgggaataactgcagaaaatattgcaactaaatttgaatttactagagaaatgcaagataaattggcattagaaagtcaaaataaggctgagaatgctataaaaaacaaccgctttaaagaagaaatcgttccagtagatgttttaatacgtcgaggaaaaatagaaactattgataaagatgaatatcctaaattaggcatgacatttgaaggtttagctaaacttaaacctgcattcaaaaaagatggtactgtaacagctggaaatgcctcaggtattaatgatggtgcggctatgttaatactaatgagccaacaaaaagcagacgaactaggtattagaccacttgctaaaataaaatcctatgcttcagctggtgttgaacctgaagtcatgggtactggtccaatccctgcaactagaaaagcactgaaaaaagctggacttagcatcaatgatatagacttaatagaagcaaacgaagcgtttgctgcccaagcattagctgttaaaaatgaacttcaaatagattcatcaaagttaaatgttaatggtggtgcaatagcattaggacatccaataggagcaagtggagctagaatacttgttaccttaatttatgaaatgcaaaaacgtaaagttgaaactggacttgcaacactttgtattggtggtggtcaaggaatatcaatggtggtttcacgataggaggaaatatgaataaaatagttagcattgatgaagctctatctcatgtaaaagatggagatacaataatggttggtggattcatggccaatggttcaccagaaaatttaattgattatttatgtagtaaaaatataaaagatttgacactaatttgcaatgatactggctttattgacaaaggagttggcaaaatggttgtaaataagcaatttaaaaagataattgcttctcatgtaggattaaataaagaaactggaagacaaatgaacaacaatgaaacagatgttgagttagttcctcagggaactcttgctgaacaaatacgtgcagctggttatggtctaggaggtatactcacaccgactggtattggtactcttgttgaggagggaaagcaaaaaattgttgtcgatagcaaagaataccttcttgaaaaaccaatttatgcagatgttgctcttctatttgcatcaaaggtcgataaagcaggtaatctagtttataaaggctctatgaacaattttaataatttaatggcatctgctgccaaaattacaatagttgaagcagatgaaatcgttgaaattggtgacattgacccaaatgaagttaatacaccaggtatttttgtgaattacatcgttgaaggaggtaatttataatggataaattagaaatgcaagaatatattgcaaatagagtatctaaagaattaaaagacggagccgttgtaaaccttggaataggtctaccaaccaaagtagcaaattatattccggataatgtaaacgttatcttacaatctgaaaatggctttttaggtttaggttcagccgaagatggaaattcaagtgatgaaactattgtaaatgcaggtggtcaaccagttactatacttcctggaggatgtttctttgatagtgctacttcttttggaataatcagaggaggtcatgttgatataactattcttggcgcacttcaggttgacaaatatggcaatatagcaaactatatgattccaggtaagatggttccaggtatgggtggagctatggacctagtaactggagctaaaaaagttattgtagcaatggaacatacttcaaaaggttctgcaaaaatattaaataattgtactcttccacttactgcaacaaatgctgtagatttgatagttactgaaatgggagttatggaagtaacatcagatggaattttacttaaagaaataaatccagctttcacattagatgatgttatttctgctactgaagctcctttaatattgtcagattcattaaatggaaaaatatctgttgtttaaaataattaaaactagaaaataaaaatctcttagacgtattacatataaatttgtattgcttaaaatattaatataaaaataaaataaaattggaggaaatgaaaatggttaaagataaagttgtattcgtaacaggagctgcaagtggaataggtaaacaaatagctgaatcgttcttaaaaaatggtgctaaagtaatgttctctgatataaatcaagaagctttaaataataccataacagagttacaaaaaaaaggttatgattgcatgagtgtaaagtgtgatgtaactaaggaagaagaaattaaccacgctatagataaaactgttgaaaagtatggcagattagatatattaataaacaatgctggacttcaacatgtttctatgatagaagatttcccaactgataaatttgaatttatgataaaaataatgctgacagcaccttttatagctactaaaaaagcatttcctataatgaaaaaacaaggctttggtcgtataataaatatggcctcaatcaatggtgtaataggatttgctggaaaggctgcttataactcagcaaaacatggacttattggactaacaaaagttgctgctcttgaagctgccgattctggtataacagttaatgctttatgccctggatatgtagatactccacttgtcagaggtcagtttaatgacctttcaaaaactcgtaatataccattagaaaatgtcttagaggaagttttgtacccacttgtaccacaaaaacgcctattagatgttcaagaaattgccgactatgctatgttcctagcaagtgataatgctaagggtattacaggacaagcttgcttactagatggaggatatactgcacaatagttattatatttagggcttgaagaaagtattcttcaggtccttctactaaggagggatatttatgagtattatcgcaccaattggtataattattggtatcatagctattatatatttttcagttaaagaaattcatataactatagctgctccaatagcaactttaatagttgttctcttaaataaaatggatgttgtaacatcaatgctaggtgctgacaaaaacaattatatgggtgcacttggaaactatataatgagttattttgcaatattcttattaggctcaatacttgctaaatttatggaagaaagtggagccactgtatcaatagctgattttattttaaataaagttggctctaatcatccttatagagttttagttgctatatttatagtaagttttatattaacgtatggtggtataagcttatttgtagttatgtttgcagtcattccacttgcaagaactctatttaaaaaacttgatatttcttggaaccttattcagataccactttggcttggtattgcaacaattactatgactataattcctggaacaccagccattcaaaatgttatacctattcaatatctaaatacgtctcttactgcagctactataccaagtattgtaggtagtataggttgtgctacgtttggacttgtctatatgaaatatgctctaaacaaaagtattagaaaaggtgaaacttacgcaacttacacttcaaaattagaagaagaatctttagatagagaattaccaggattttttgcaagtatttttcctctattagcactcgtaattatagctataactggaagtacttttggttcagaatttatgaaaaaaaatgtaatttacatagctttaatagttgcaattcttttatctgcttttttattccataaatttctatcatctaagatacagacattgagcataggtgctagtggttctataggtcctatatttgctacatcttctgcagttgcatttggagcagtaataatggctgcacctggttttgatgtatttagcaaacttataatgtcaataccaggtagtccacttataagtcttactgttttgacttcaacaatgtcagcaataacagggtcctcttctggtgcattaggaatagtaatgccaaactttgcagattattatttaagtactggtctaaatccagaattaattcaccgtgttgctacaatagcctcaaatatactaactatagttccacaaagtggtgtttttcttacattcttaagcttatctaagttaacacataaaactggatttaaagaaactttcattgtagttgcagttggttcactaatagcagaaattattgtaattacattaggattactaatgtattaatataaaacaaattaaaattcataatatgaaaggtggtgtctcaaagtgaactttttacttaatgagacactctttttgtatgaaatcaaatatattttaatcatttcaacaataaaaaagaacctttctctattttgagacaaaccctttttattccttaaagatttaaacaattataatttgttactaatacgaaaacatctattgaataaatttaaccaaataaaaaaaaatttatcataactataaatttacgttatggaattattataaaaatattattttctctaagtaagtaattccatactatacaggcttttaatacaaattttcaaacacactgaaatatacctatttattccatatatatcttttttacatatctttacagtaaaaaaagtcttaatcttatgttagtatagattcacgggtaccccctacactaaaggttacaaatcagtaacatttttagaatttttagattaagaggtgtttaatgatgagaagaaatataccaacaaaattaaaaactatattagctttaggagtgttaactttagcaacagcttcaagtgctgttactgcaagtgcttcatcacttgaaaataatgtaaatataagtaacaaaagtttagtatatagtaatactaaatacaagttttctgcaaaaccaaattgttctgtaaaaccagaacttaaacctgataaagataactcttgtaaggataagaatcataatgacaagaattgcaacaacactaataaacctgaggacaacaataattcagactctactaataagcctgataacaataaaccagagtctaataaacctgaggacaacaataattcaggctctactaataaacctgataacaataaaccagagtctaataaacctgaagacaacaataactcaggctctactgataaacctaataacaataaaccagagtctaataaacctgaagacaacaataattcagactctactaacaaacctgatgataataacaactcaggctctacaagtgaaaatttttcagcttaccaaaaagaagttgtcgacttagtaaatatagaaagagctaaagctggattaaatcctcttactcttgattcttctatatcaaatgttgctacaaaaaaatctcaagatatgattgataacaactatttttcacacaattctccaacttatggttctccatttgacatgttgaaaaaatttggaataagctataagacagcaggtgaaaatatagctatgggtcaaaaaactcctaaagaagttgtaaacgcatggatgaattctgaaggtcacagaaaaaatataatgaatccaaatttcagtaaaataggtgttggagtagcacaaaaaagtggtggttcaatttattggacacaaatctttgtaggataaaatactctttttccatgcatatcaaaagagtatctctaagtgataaaaaacacaaatgagatactcttttgtatctattttaaaattatcaaatccaaatatacatactataaatattatttgttctcttaattttagtgtgtagaacaatatataaaaagtattggcaagatgaaaatggaaaacttaaaaagatatttaataggtaaaaacaggatcttaatatcttcataaaaaaaggctgtctcaaaatagagataaggcctttttcattgttgaaatgattaaaatatatttgatttcatacaaaaagagtgcctcatgaactaaaaagctcactttgagacactctcttttatcaattctatataagcattataatactttaatattattcagctaattttttgtatccttcatatctttctttagcatcagcttcagctttagcaaataatccatcagcttcctctgggaattgtttagctatagcagaatatcttacttgtgcaagtatgaaatctttgaagcttgcagttggttcttttgaatctaaagtgaatgggtttttaccttcagcttttacttctggattgaatctgtataaatgccagtatccgcaagcaacagcttgtgcttcattagccacagttcttcccataccttcttttaatccatggtttatacatggagcataagctattattagagatggcccatcatgtttttcagcttctaaaacggctttgataaattgatttttatcagcccccatagcaacttgagctacatatacgtttccatatgtcatagccatcattcctaaatctttctttctagattttttacctgaagcagcaaacttagccatagcagcagctggagtagctttagaagcttgacctcctgtatttgaatatacttctgtatcaaatacaagtacgtttacatcttcaccagatgcaagaacatggtctaatccaccgtaaccaatatcatatgcccaaccgtctccacctagtatccattgagatctcttaactagataatcttttctatcttttatagcttttactaattctttagctttttcatctgtacaatcacaagctggtttttctaataattcaacaaccttagcacttgctactttagaagcttctccatcatttctagaatctaaccactctgtaaatactgctttagcatcttcacagatatccatagaaactaactctgtcatagcatctactattttatttcttatttgcttaacagctgtgtacataccaaatccatattcagcattatcctcgaataaagaatttgcccaagatggacctttaccttcatggttacaagtataaggaattgatggtgcagaagctccccatatagaagaacatccagtagcattagctatcatcattctatctccatataattgtgtaactactttaatgtacgcagtttctccacatccagcacatgctcctgaaaactccattaatggttgtctaaattgacttcctttaacagtatttgcaggcataacatcaacttttggagctacttcatcaggatttactgcaaatgcccaattatctaactctgtatcaagttgagtatctattggcttcataactaaagctttttctttagctggacatatgtcagcacagtttccacatcctgtacagtcaagtggactaacttgaattctatattttaatccttctaatcctttacctaatgcttttttagcttcaaatccttctggagcattagctaattcttcttcagtaactaatactggtcttatacatgcatgaggacatataaaagaacattggttacattgaatacagttatctattatccattcaggaacatcaacagctataccacgtttttcataagctgcagtaccacaagggaatgttccatcttctataccattgaatgtacttactggtaagttgtttccttcttgtgcagtcattggtcttagtatattttttataaattctggttctttaacttctcctttatctgcatcaacagcattttcccaagaagctggaacttcaactttaactaaagcatttattcctgcatcaacagcagcatagttcatattaactattttttcaccttttttaccataagctttaactatagaatcttttaagtatttaacagcatcttcttctggtattatttcagctaatttaaagaatgcagattgcattatcatgtttattctgtttccaagacctatttcttgtcctagtttaacagcattaactgtatagaattttatatcatttttagctatatattgtttcatatgagctggtaaatgttcttcaagtcctgcttggtcccatatagtgttaagtacaaatgtaccaccttttttaagaccttttaataaatcatattgataaacatatgattgtttatgacaggcaatataatcagcttcatctattaaataagtagctcttattggagtatcaccaaatcttaagtgagacatagttataccaccagattttttagagtcataatcaaagtaagcttgagcatatttttcagtatggtcaccgattattttgatagcttgtttattagctccaacagtaccgtcagaacctaatccccagaacttacatcttatagttcctttagaagctatttttattggctcagatggagttaaagaagtattagttacatcatcaactatacctactgtaaatccatttttaggttgttctgaaactaagttatcaaaaacagtttttatatctgaaggagtagtatcttttgaacctaatccgtatcttccacctattatcataggagcattttcttttccatagaatacatcacgtacatctaagtataatggttcaccagttgaacctggctctttagttctatcaagtacacatattctttcaacagtagatggcatagcatctaagaaatgtttcattgagaatggtctatataaatgaactttaactaaaccatatttttctcccttagcatttaagtaatctatagtttcttctattgtttctgttactgaacccatagctattaatacgtatttagcatcttctgctccatagtaatcaaataaactatgttttctacctgttaaattactcattttttccatgtatttttcaactatacctactatattttgatagtatttattagaagcttctctagtttggaaatatatatctgggttttgagcagtaccacgagcaactggatgatttggagataaagcattatctctaaatgcttgaactgcttcaaagtttaataaacttgcataatcttcattttctagtaattcaactttttggatttcatgtgaagttctgaatccatcaaagaaatgtataaatggtaatctaccttctattgcagctaaatgtgcaacaggtgctatatcagctacttcttgaactgaaccagaagctaataatacacatccagtttgtctagcagccataacgtcttggtgatccccaaatattgataacgcttgagatgccaaagcacgagcacttacatggaatactcctggtaataactctcctgcaactttatacatgttaggtatcattaataataaaccttgagatgctgtaaaagtagaagttaaagctcctccttgtaaagaaccgtggaatgttcctgatgcacctgcttctgactgcatttcaacaacattaactgtttgtccaaatatattttttcttccttgtgatgcccactcatcaactacttcagccatagttgaagatggtgtgattggatatatagctgctacatctgtaaacgcataggcaacatgagctgcagctgtatttccatcaagtgttttcataaacttagccataatatgtatcctccttgatagctacaattgtacttgtttataacaagtctatttttttatatttacatataatttacacaacaaaaatataaacacacatatagtcgcgcaaatactctatcttctaatataatactacagattagataaaattcctttgaaaattgtaaattaattacatatttaagtagattttttttaaaattaaatatgttaagtttttttcataattttgtatacaatatataataaattaagttagacttttcaaacttttttatctatttgtttacattagtataaaaagtaaaataattatctttattatatgtaaatttttatatatataattttaccatattacatcatatttttgtaagtttttattacattttttataatacccctttattttataaattaatctaatcgattaaatttatcctatagaaatttattacatttaaaaatatgctagcaaataaaatatctactagcataaagtctatttataatattaatcaactattaattctactaaatctccatttttaacgcctgctgcatttccctcttccatatcaacatgcatttctagattaaagctatcactagctcttactaatacattttcaaatactaatgctcttggtccagatgttttaacttttactatttgcttatcagttacaccaaatttagcagcatcttcattgctcatatgtatatgtctagaagcaactataactccttctttcatttcaacttctccagcaggtcctactaatttaacacctggagttccagctatatcaccagattcttttattggtgcttttactcctaatgggaaaccatctgctaaagatatttcaacttgagtatgagctctagctggtcctagtactctaactccctttaaagttccttttggtcctactaaatccactttttcttcacaggcatattgccctggttgagataatggtttaaatttagttaactcatgacccgccccaaataatacgtctatatcagcttgactcaaatgaacatgtttattagataatgctattggtaatttcattgaaattccctccttttaattatttaaattattgcaatacaattatacataatattacctacaaaatcaaattatattgaatcaatatatatctttaaatttttatatattatatctttaaattcttgattatctatataagatacatcatctgtattgtttaaatatatattgtgtaaaagtttagtatttatactcttaaagaaaaaatccataacaatctgtccacctttaaactgtgaatcatatgatttactcccccccactgcaatatacattcctatccgtttcttatttctatcaattgaaggtttatttaatacatatttacttgcatatatagcttgagttctatcaacaacagtctttaatttagctgatattgaatcaaaatgtacaggacttattactatagttccttttgaatcatcaaacattttatataatggcttcatatcatcattaaacttgcaataccctgttttttcacaaaatccacatgctgtgcaatattcaatatccatattgtagatattaaatattttacaacttaacccacactcttctagcatagcttttactttatttgctataaaactgcaatttttattaattcttggacttccatttattattataatctctgtacttttaagtccttttttatcgtttgaatccataatcaatctacctatcctttaacataactattaaaatatcatcatcataattatcttttgatgagaaattctttaaatccaattttagattttctactattaactgttgatttaatctaaaattttcttttagaaagttttctaatctgtttataccatactcttcttttgatgaattttttatctctaaaattccatcagtgtacatacataccattgcataatcttccattgaaagagtattattttcataagtagcatctttcattattccaataggtatgccctttttacaatttaaattattttctattgtgccatctttctttacaactacaggactatagtgacctgcattagacacagtaatcatattttctttagtatctataatacctatcaaacaagttgtaaatactcccatcttgtcaaattcatcatataacatcctatttaaatttgtcattatttctcttggtgtattgtattgattgcataatactttaaaagcaccttttatcattgcaacaacataatttgataccattccatgtcccattacatcagcaacaatataaactatatgttcgtcatccacttttgtagcataataaaaatctccacctactacccttgctggtttatggtaaaaataaagttctttctcatcattacaatccattttacctttatccataataagctgttgttgtttatttaatatgttcaactcattttcaagaactttgtgttttacttccttttcattatgttcatataattgcatcccaacagaaacttgtttggacaatatactaagaatatttaaatcatcactagtatagtttttactatttgcacaaactatacatcctatagtctcatttttatcctgaagtttgtaatatatataactttccaaatttatgcccttttttgagcatggttttaaattatttaggtatccccctaatgactctttctttaaaaacatatcaatcataggatataaatttgttttctttttttgctcaacattataacaactaactatagtatccttattatgatgactatttataattattaaagcttctttactattagtaatattacacgcttgtttacttaaattttccaaaaagccatcaatactcttattaaggtatagttttttagtagcttcatttatggcacttattgagcctcttagtttatcaattaaaatttgtacattattatttttattagttatttctattgataaacttaagagtgatgcaacagatgatataaaatctatatcttgttctgttatataatcatcctcttttaaaaaacaagtcataaatccaacaactacattatttattataaaaggaaaaactattctcccaatataaccttcagcttttgctaaatctcgttcaccttctgctctagaatcttcaaatacattttccacatatattatctttttttcatttacagcctcatgtatatactctggatatgtgtcaaaatcaatttttgcacctttaagactatttattggaaaaatttgaggtacatattctaaggtttgcgaacatactaagtaggcatatttagaatcatttttataaaatagatttacacatgcctttgtagggtgaacaacttctaacattttttctattatgtcatcttttatattaaaaaaatctgtagattccgtcaccatagcggatatctccactaaattcttcattttataactgccattagtcatactcaatttctccccctatatattaaactatttattagtattttaacatacattctttatagtaaaaacaaaaacaacgacaaaactagcaactaatatccagttaaatcctgtcaataatcctataagaagtaatgtaatcaatgcatttagacctgttctccctttttcatccataaaagttattttagagatgtcgatattatttttcacattatttatatgctcttttacttgttcttccatatttcttttatatagtatataaactacaccaattaaaaacactcctatacctagaatcatgtttaaattaaaagctatcataagcagtattgaaccaaaagccaactttaaaagcttaaaaaatacgctatctatctttagagttatatttctgatttctttacattcatctcttaaagaatatccacttgagtctaggttattaatctttgtttttacaatttcagaataaaaaagctttattatcccatttaacattttcatcactcctaaatattttacatatatttgtaagttttacaattataatattttttatacttggtaataataaaaaataacaaatattttatgatttagtatttactgtaaataaattattgaagctttattagttaagtatagatttttaataaatatttttataattagaaggaagtggttttgtgcaaatagaacaactcgatttagaaacgagaaataaaatatactgctatactaaaaaaattcttagaaaatatcaaaaaggcataacatctggaaaattaacagcagataaatttgcagataatatattgtctcaacattttatcagtagtatacttaatgaaaaaatagtcaatgagacaaattttaagatatcttatagaaactatatagaaactttaataaatattcaaaatgaaaatttatctaacttaagaaaaaaatctactaaaactgcaaaatgtttcaatatctctcaaataacccaattaaaaaacttactaagtaatactggttataatttattaattccatataaatacttaactgctagagatatagaaggaatcgttactcttattaatactgggtctattgaacttggaaatgagagaatctataattatatatcaaaagcataataatttaaacctattataaaaaggcaatttatttaataaaaaatatttttaatattaaataaattgcctttttaattttggactaaatactgctatccaagtgctttttctagtttagataaatgttgtattggataatattttagtagctctttaaattgttctactgataaaccttctgttgttgtatatattcttattttttcatctaagtcactattaataaatttgttttttaaatcctcaaaatttacactactcattttacatcactccttatgtaacatattcatttgtattattttatccaaatacataaaatttattacataaaaatatatctatttaataatttaataaaaaaaagctatctcaatttagaaattactttctatatttgagatagctctagctaaactaatagccaatagttataaataattatttataactatctgttgctttttccagccatttgttgttcagccatttcaactaattttttagtcatgtatccacctacataaccattttctcttgcagtaaggtttcctttatcaacttgttgataattactcataccaagttcattagctatttctaatttcatttggtttaaagcctcttttgctcctggtactactgttctgttgttgttattgttacttgccatgttgattaccttccttctgtttaatttattttgtgttgctgataatattatgtgattttaaacatttttaattcaggtaatttttagcaattaaaacctgccaaatatccagtagaaaaagctatttgcaaattgaatccacctgtatatgcatctatatctattacttctccagcaaaaaataaaccttctactaattttgattccattgtgcttgaatttatttcgtttacttttacaccaccagaagttattatagcttcttcaataggtctgtatctctttactgtaaactttaaattttttaataaatggactaagttttttctctgctctctagaaatttggtgaacaaccgtatttgcattaatttcacttaagtttattattataggtattagtttttttggaagtaaatcatctaatgctttttcaaattttttatttgtatacttctgaaaatctttttgaactcttttatccagtttttcctcatctaatgcaggttttaaatctaataatatagtgtaattttctttccttgtatctttcattctacaacttgcagacttgattataggtccatctaaaccaaatctagtaaattcaagttctccaaaatcactataaactttcttttgtttgctattaaacacccttatttcaacatttctcaatgataatttttctaaatcttttgtaaaactttcttgtacttctataccaattaaagatggttttgtatctataattgtgtgcccctgtgaaattgcaaatttatatccatcaccagtagaaccagtaagtggataacttaatccaccagttgctactacaactgaatcacacttaatttcttttttatcgtttaaaattactttctcaattttattatttttagatattattttttctacttttgaatttaataatatatttactttcttacttttaagttgtctttcaagagcatttacaatatcaaaggctttatcactctctggaaaaaccctttttcctctttctgttttagtctttactccaagattattaaacatacttattacatcatcatttgtaaaagtataaaaagcactataaagaaattttccatttgtaggtacattttctattaattcctctatttcacaagcgttagtaatattacatctaccttttcctgttattgcaagtttttttcctaatttatgatttttctcaattaatgttacatcatagcctttctcacatgcagttgatgcggctatcatccctgctggtccaccacctattattactaccttcttcaaataatcactcttttctacccttaatttttttaatttaaactattgactctataccttaaaatcaatttaattttaaaagtttaaataatgctggagctcctgctattccataaaaaacaactactgtattcttaataaaattcataaaaattatactcatagtagagtcacttatatttaaagtgactattaacattgaaataaacaacttaatgccaatatataacattcctattgttactatcccaaccaaaaacctacatattcttgaaaaaattatatttttactccccttatttttattgctaaaatttatttttttgttattattatctgtattaaatttaacaaatctatcctcaaccatatatccaaatacaaatcctactattataccaaatttttcaaaatattcagggctatttagaaatatagctactattataaatggtataagtaaaactacaagtaaaatataatttttattatcatcaatatagtcaaatatttttataaatataactgtaaaaaatattcctaacatccaacccactatcacatctattggccaatgaacagctaaatacagcctagacaatcctactcctaaaaccataactgcacctattaaatgaagatatctctttttaaatatagtcataatactaacccaaaatgttgttgcagtttgagtatgagcacttggaaaagaataaccaccagcagtagaaactctcaatgattcaagaccttttattcctattggtctgggagcttttacaaactctttgatgcctaaatttacaacaaaatttccaattatagcaaacagtattttctgtccacattttttatttatacaccagtatataattgttgtaattaatattaataacggtgcttctgtgcttattgtaaagacaagaaatataaagttcaaaattggatttcttaaattttggaaaaataataatatatttaactgaatatccatatagatgtctcctttactaaaattttatataattaactaaaaagcactaactcccttagaaattagtgcttttgattcacatttaaatctattctacatcctcaactatacctatataaggtaaatttctatacttttcagcatagtctattccataaccaacaataaatttgtcttctataacaaatccaacatagtctacaggtatattagcttttcttctctgaggtttgtcaagtagagtacatagttttaaagattttggatttctagtttttaaagctgcaactagattacttaatgttaaaccagaatctattatatcctctacaatcaacacattctttccttcaatatctacatctaaatcttttaatattttaactgttccagaagactctgttgagtttccataacttgtaacactcataaaatctatatttacatccaaatctatacatcttattaaatctgaaacaaatacactagctcctttaagtatacctaccactagtaaatcttcgcctttaaagtcttcttctatcttttttcctaattcataaactttttcttttatttgttcttctgtcaacatttttcctgtaactttgtacattttgtatcctcccgctttccttctattaacttatatattatagcataccaaaatatcaattaaaatctttttcatcatttttagacctaaattaacagcttatccatacttttttgctttttccattaaaaatttggaataacgattcctttgtattataatctatatgtacatatattaatcagttatttttatcgattatataattttatttttggaggtacttttatgagcacaaatcatggagctaatttatatagtttatctagtaagtatggcttttcaaaggaagaatttatggattttagctcaaatataaatccttttggtacatcaagtttagccaaacaatacattgtaaacaatatagatatggtatctatgtatcctgaccctgattacatagacttaaaaacttctatatccaattactgcaaatgttctatagataatatagtacttggcagtggagctacagaactaatttcatcatttatacatacaattaatcctaaacaggctcttttactctctccagcctattcagagtatgaaaaagagttatctaaaattaattgttctatagaaaaatactttgcaaaagaagaagataattttcatataaatttagaaaatcttataaaaactatcaatgctaaagattatgatttggtagtaatctgtaatcctagtaatccaactggatttgcatttactaaagtagaagtgagagaaattttaaaaaatacagactcatttttaatgattgatgagacttatgtagagtttactgatacagatacatactcttgtactcaattagttgatgattattctaatttattcgttataagaggtacatcaaaatttttttcaacgcctggaataaggcttggatatggtcttatatctaacactaatgtcaaaaatgaaataaataaaaatctagatttatggaatataaacataatagcttctaaaatgggggaaatcatgtttagtgatttagattttatatcaaatactatttccttaatgaacactgaaagagattacctgcttaaagagcttaagaatataaaaagcttagatatatacaatactaaaggtaatttcatattgtgtaaaatcaaaacaaaggaattaactgctaaatcgcttcgagaacaactgcttccacaaaaaataataataagagattgttgttcatttgaaggtctagatgagtatttctttagagtatgtatattaaaacctaatgaaaataaattattaatatcatctcttaaagcaatttttaaataaaaaaatccctttattttataatttttttataccataaaaaatgagctatctctatttgagataactcatttttgattattaaaaaactaagcactttgctcttctttgtttccttttttactcattccatcatttattttatctactactactgctattgcattatctcctgatacattacatgctgtaccaaaactgtcttgagttaagtataaagctatcattaaacttgcaagcccaccatctgatggtattccaaccattggtaggaaaggaagtgcactcattatagccccacctggtgctcctggtgctgcaaccattgctatacctaacattgcaatataagggaataatacacctattccatgtggcataccattcatcattaaaactgcagttgtaaatcctgttattgatatcatactacctgataaatgtattgttgcacaaagaggtacaacaaattctcttatttgcttacttactccatttttttctgcacaaccaacattaactggtatagttgctgctgaagattgagttcctatagctgttaaatatccaggtacttgattttttaacattcttactggattttttcctgaaaatacacctgctgctgtgaattgacatgccatatatacaaaatgtaaaggtattactactaagtatactttccagaatacccctaatattgtccatacttcccctgctatagttatatttgcaaaagttcctgctatgtataaaggtaataaaggtataatcactgttgacaacgttttcgttacgattccttgaaattcttggaagaaattaaataaagtctctccttttccatgatttcttaaagctgatattccaagtcccattacaaatgcaaatacgattgcagctgttacatctaccataggctctaatggaattgtgaatattggagctaacattcctgcctctgggtctccaatttgacttgcaacacttgcatcaataaaatttgggaagattaatgtagatactgcaaatgataataatcctgctattaaggtagaaccatatgctattcccgtagttatccccaataactttcctgcacctgttgctaaatcagctatacctgctgttacaaaacctataattataaatggtataacaaattttaggaatgctgagaataaggtactaactgttactaatatttgtactattatttctggtgcataacttccgattaaaataccgactatgataccgatgattagtttgggcactaaacctatttttttcttcataatatttaccctccataacttttttaaattaagcattcttgcacattgaatacttagttaaatattggatatccacttattatgataatagagttttacctctccgtcaacaatttaaccattttttgttaataaaaaaaagaataacatatataaattgttattcttcttcatcttttatagaaaattctacattttcaattatatttgaatgtttatctttttttataataactctatacttattaatttcttcattcactatacctatactccaaattaaaactatagcatcatctataaaaccaaatgcccctgcaatcatctctggaattatatcaaccccagatacaaagtaggatatagtaaaaattaatacagaaattacctttattttatcaactatattgattcttttatctgtcataaaatcaggtagtttaagtaaatcaaatacaaaaaccaaaccaaatttagcatttttaaatctgaccaaaattttttttaaaatatctaaaactatattaatgattatttttaaaaactccatatttatcacctcttataattataggttattctacattataaccgatataattaatttgatgaacatattagatataaattttatcaattagtttatatttaaattataataattcaattcctgcactactacaattttgaatcatatcctgtggccatactccaacttgtacttctcctatatgagctttttgtaagaaatacatacatattcttgactgaccaattcctccaccaattgtatacggaagttcgccatttaaaagcatcttatgatagtcaaactcttttctctcttcacatccagcaagtttcaattgtctatcaagagattcttcatcaactctaattcccattgaagataattctaatgctgaatctaaaacaggattgtaaaataatatatccccattcaattcccaatcatcataatcagggcttcttccatcatgtttttctcctgatattaatgtttttcctatttgagttataaatactgctttcttctcttttacaattttatcttctctttccttcggtgataattctggatacatatcttctaactcttgtgatgttataaaagttatttcttctggtaatatttcttttataccttcatacatactacatacaaaaatttcagtatctttaaatactccatacaatctttttacaacatcttttagagtcttttcatttctactacttttatctataaccaattcccaatcccattggtctacataaagagaatgtatattgtctaattcttcattttttcttattgcattcatatctgtatataaaccactaccaacttcaaacccatattttttaagggctaatcttttccattttgcaagtgattgaacaatttctgcatttttattcataaatggtatatcaaagcttacagccttttctccatttaaattatcatttgcacctgtttctggcaatacaaataacggagaagaaactcttataagatttaattcattacttagtctcatttcaaaaaaatcttttaatttttttatagctatttgtgtatcaattacgttcaaactacttttataatcctttggtattattgtgctcatatcattcactccctatatttatatatttttccattaaaaaaacccttcatccctatataaaagggacgaaaggttgcttttccgcggtaccaccctgattagtttgaaataaattcaaacccagctcacaatgtacagatattactcgatacaccccaatatgataacggtttggttccgactaagcctactcttttaaaatttcggttagcaactccaggatgttcttcattatagacttcatattggtctcacaccatcaccaactcgctttaattacattctataactactcttcctttcaaagtctttaagagtttaattcaataaaatttagctctcttatgttttctatttattcataatagtatgataagtgattagttaaaatttgtcaagtttattatttttttatttttaaacactttataaatttttacctatactttataaattttcaaatatagtctttaatctgtccatacattcttttaataaagactgtggacaagctacatttattctttcaaatcctattccttcttttccaaatatataaccttcatcaaataatacattagcttttttaaacattaaatcctcaagttctacttcatttaatccataagcagtaaaatctaaccatgctagatatgttccttctggataaacaagttttacttttggtaggttttcttttaagtattcatcaataaattgtatattattatctaagtaatcatttaattcattaagccagtcttcactttcattatatgctgctattgtagctacaatagcaaagggatttggtgaagttgcaactccaacagctgtaacctcttcttgatatttcttttttagttcatcattattcactattatattagacaactgcattcctgccagattaaatgttttacttggagctatacatgtaattattttatccttgtactctgggcataatgactgtaaaggagtatgtttaaatccttttctaactaaatcagaatgtatctcatcagctattatccataggtcatattttttacatatttctacaaccttctttaattcatcttctctccaaactcttccaacagggttgtgaggactacaaagtatcagtactttattgttgctacacttagctttttcttctaaatcatcataatccatcctataagtaccattctcatatattagaggattgtttacaatgtccctattattgctctttatcttagcttcaaatgggtaatacactggtttttggactattacaccttcattagaattagttaatattcttactaaaatagcaacagcaggtacaacaccaggactaaaaataatatcttttctatttatttcccagttaaatctccttttataccaatcacaaactgcattaaagtatttatcactatcatttgaactatatccaaatattttatgttcaacttttttacgtaatgcttctattattggttctgcacattcaaaatccatatcagcaatccaaaaaggcaaaccatctttttgtgcttttgttgaacaattagttctaaaatcccattttacacaatctgttcctactctatctattactctgtcaaaattatacttactcattttttccctcctaagaataaaatttttataattgttaagtccattactagatgcactttggtattattttacaattcttaatattataataatatcacttttttgtccaatagatttaaaatataattacttttccatcatattttttcaatattccaaaatcagtttcattatatcaaaataagattgctcatattaattattttctaattaacataagcaatctttttctataacttctataattataattttaaatgtagaattattagtttggatattatcccaatctcttttcaaccaatctacaccatatatctacaccatattctaaagctttcgtatcaaatgttacatttggattatgaaatcctggtgtagcatcagctcctaatccaatatatgtagttttacattttagtttttgtgtataataatggaaatcttctccaccagaatttttaaatatacctatagatgcatcagctcccaatacatcttttatagtttcttcagccaagtttacaagttcttcatcaaattctgctgctggtactccatctttggaaattagtacagcttctgcatttatagaacttacagcagtttttacagcatgtattgctttttcttttaattcttctattatatcattactttctgcccttatatctaaagccataaatgcttcatctggtatattattataagtttctcccttaactgatatatttgttacttttatagaatttggtatagctggatttactcttattgcatttattgcattcactgctaaacagacagcatctactgcatttactcctaaatgtggtttagaaccatgacaagtgatacctttaatcgtaaattgcattatacagctagcacaatggtacattgcaggtatcgcctttcccaacctacaatcttgtccaggtcttaaatgcatccctaccatttcttctacatcatccaacaaaccagaatcaattactcttaatgctccatataatttttcttcacctggttgaaaaagtatttttaacttacctctttttactaaatttctctcttttattaactttgcagctgttaaaagcatagaagtatgaccatcatgaccacaagcatgtatcattttcttttctccatctatgataaattccaatgcatccatatctgctcttatagcaaatactggtccttcttttttagaatctatagttactataataccagttcctgcaactcctttattaatattttcaaaccccattttttcaagctcttttaaaacaaactctgatgtcttatattcttcaaatcctttttctggtatagtgtgtagataatcatacactttatgtacatactcaatataatctttgttagttcccataatctagctcctccttaaaatttaaactttccatttatattaaatttttattataattacctatactacgaaataattcattataagcattgcaatacaaccatttaaagttgctataacaaacatatgtggataatatttagtttttaactcagctgttcccaaaagtctccccataaattgtatctgcgctcctgaaagcaataacattggcaatagaattgcaacatgtgcttgacttatttgacctgctgtaaataaacctgcgattactccagatgctcctcccattgatataaatattgtcattatagctgttgctgcaacacctggaagtccaaagatactcattacaggtgtaaatattgtccctattacatccaaaagacctgttaaattgaacacagaaattatagcaaaaccgaagatgacatttggagccattgaatttgtacttatttggaatccatttctagctcctccaataaacgcatctatcacatttccttttttaacttttacttctttttttgctacctcactcatgttaagcttcccccttgtcaaatttatttaaatataatctaagtaagttcgccccaacaaacttcataattaatattaaagcaagtggtataaatattggtacatctcctataaatggaaatagtgctgctccagaagcaaagaaattcgtaattgcagacgcacctgaaaattgaaatgcacaaaatacagctttttgtttttcatctatatacccatcatctttaagttctttagtcatagatgcagctgcatctgtagactgtaaactagctatcaaagttagtcctgcaaatccaggtaaccctaataatggctttaatagtggactaagaagcttttgagctgccttcattccatctaagtggtctataactctaactactccaagtgcaaacataactgatggtattaatgtcaatgcatatagccatccatctcgagggccagtacctccatcacctctaaagtttgaagctaatgtacctacaccatcattaattgttcccaatgttccaaaagaacctaatacattgttaaaatccaatacttttaatggtcctggtgcatctttaaatattcctgaaaaaaataatgctcccaatattaatgctacatacccataccattttacctcaactttttctgttgttgattctaatttactcatataaattctccctcctgtttaaatgaattttattagtatacttgtttaataagcaaaacttatgccaataccttaatgataaagcctttgtatttatttttttattgtaaatttattccagcgattaaatagcttataattacttacttttcaagtttaaaaatataatatttttttattaactatttaaaatatacattacaatataaaaagctattttccttatcttgcaaaaataattttaaaataggtttttataggataaaatcctaaaaaaacctattatttaatcaaatatataaatttatactactatttgttgtataatataacttaccttatactttaaatactttaaaaataaatactattttgttaggagaaataaaatggataaaaagaagttaatccttataacatatgataaattaaatagtgaccactacaaagaagaattaacaaacttttttggagacgaaataatcatagaaacacaaaatatacttgatggaataaaagaaaatttagagggagaggtagtgctttctctatcacctttaactagtaattttttaataaaacattttaaggaagatattgaaattattcatggaacgaaagcactttcaaaacttggatatgaaaaaatgatgaaactacctccaggtacaaaatcgttacttatgacaaccaataaaacttcagcatttgagatggctacttatctatataaaattggtataaatcatatagattttgtaccgacatatccagattgtgatgaaatatatgatttagatacagctataacaccaggtcagattagatttataccaaaatacataaaaaatattgttgatttaggttggagaaaaatctcattagatacatatatgtcattattagtagtattaaaactaaaaaatgagaaatttatagaaaaactatacaaattgtccaaggagacactaagtcatgatttcttaaatacgtcattagataatatatctaaattaaaaactatactttacatgaccattgatgaaataggtgatggtctaatatttttcaacacctttaacaaggttacttttgtaaataagtctttacttaatatgttggaactagatgaaaaacttataaaatcaccttccttaatggaatatatgccaaagagtttcttagataaaattacaaagaacttaaatatcgataatatgattatatacatagacgaaatagataaaaaattcatactttctaaaaaaccattttatctttataaaaatatagagggttgcttaattacattaaaagatgtaaacaatatagaaatattagaacaaaaaataagaagtgattctgtcaaaagaggttatgtagctaaatataaatttaataatattattggaaatagttctattataaaagattgtattaaaagggcaaaaaaaatggctcttacagataatcctatattaataacaggtgaaacaggaacaggtaaagaagcctttactcagtcaatacacaatcattcaaatagaaaaaataaaccttttgtagcaataaattgtgcttcattaccaagtgaattacttgaaagtgaactatttggatatgaagatggttcttttactggagcaaaaaaaggtggaaaaaaaggattattcgaattagctcatactggcactatatttttagatgagataggagatatgccacatgatttacaggttaaacttttaagagtcttacaagaaaaagaaattagaaaaattggtggtacaagtattattccaattgatgtgagaatattagctgccacaaataaagatttagaaaaattaattatagaaaataaatttaggatggatttattttataggataagtatgttcactttagatttacctcctcttagaaagagattagaagatatacctcttcttttagaatcatttttaaaagaacttccctataaaaacataaaactcgataagagtcttttagaagctttaaattcatacacttggatggggaatattagagaactgagaaattgtgttgaatatatggcttacatgggttccaattatcttacaataaatgatttacctcaaaacatatcttcaaaattaaataataatcatatgtcaagtaatatgtctatattcaatgatttaaaccaatatgacaaaaacatatgcatttctatcctaaaatcattgcacatgaaaccaatggggaggacaaagttaatgaaatttatggaatataatgtcacagaatacgaagtaagaaatatgctagaatatttgacacgcaatggatacttaatttctagtaaaggaagaaaaggctcatcaataactgagaaaggcataaaaataatagaaaataatataatttaaacctatagtaattcatctttactttatcaaaatttatatataattataattttttatttttctataaattttttataaaataataaaacttatttatattaaaaaagaagctatctcaacatagggataagcttctttttaattgttaaaaagataaaaatatatttgatttaacagaaaaatagtgcctcataaactaaaaagttcattttgagacacttccttaatattaataaattaattggcttaaaattactgattgataattataaagtacctctgttaaaggagtaaattctgaaccgattccaaatcttaattctgtaaacgcctctaaataatctgggtcacatacatcttcttgtgttaaatcttgtttcaccatttcagtagcaagataaattgctactgatggtagaaaagcatccattggcataggatatccaccaagtctatttgacataccaaaagccttagccttttcacttatcatgtcgtttattttatcataattttgagcatctttttcagatatttttagacccataacactaggatacgtttgtattggtgatggattgctttgctctgcaactatatactttaattctaaagccttagtcaatataacttcatccatatactcatttacaccaaatacatttatatcttttccatattttttaacttgtttttcaatatcttcatttaaaaactgcttaactttgtttttgtcttcttcagtatttatatttggagtattaacttgtacaaatggcaatcctatatttttacaagtctctttaatcatttctaatcttttggctatattaacatctttcaaatcatctgtagaggcataatgaataaaagcttttgctcccatttcttttgaacgttcagctaatacttttcctctttcctctgcactaacccctagattcacatcaacaaattggcttaattggtttttatcatctcccataggggcagaaatagttattatttctggacgcttttcctttaccttttgtaaagcaggtaaaagccctgcttggtcagttgaaactacaatagcctgaacttctttatcgtcagccaactttactatcttattaatagcactatctatattagaagtaaaattctctggcaatacaacatgttttatagtttgtttaactttagtttgaccatctttgtctttatcaattttattctcttcctcatattcttttgtcatctcttccaccatattgtattgtactttattttcagataatggttgagttaccactgcaactttaaaatcatctataattttctctttatctttcttgcctacaagtaaactacaacctgtaagtccaataattaaacatatggatagcataaatgctgttatttttctaagcattaattaaaacctcctaaatttgtactttcttatcactattactaattttatcatacttcaaagaaaaattatattataaaaaattatatacatgctattccaatccaatctaaaaagtactatgggtagattaggtttagattaaacctacccatagtactaaaaattaatatattataaaattaaattaattacaaattattatgctacttgtttgttgctttttataaagttaccaactattccacccaatatagctggtattacccagttaaagcccaaacctgcgagtggcaagctttgtataaatggaacagctcctgtcattccatttatagctgataatagactaatcactaatgtaacatatgctgcacctttaaaagcattatcattctttatatgtttaccagccaactccataacaactattgctaataaaacaggatatatagtttgtaggattggaactgatatagctattatagaatcaacacctaaatttgatataagcatactagctacacatatacctataaccagttgtttataactcgccttacttattccttcaaaataagttgatattgatgctgttaaacctgtagaagtagtcagacaggcaagtgccacaattacacctaaaattacctttcctacttgaccatataacaatatactagttatttcaactaataaagatgcttgaggtatactagtatcatataaagttgaaactgttgcacctaaataagtaagaccaccatatactactgctagaaatacacaggctacaaaaccagctttaatagtcattcctatttggtctttatctgatgtatatcctttagctattatagacatcaacattatagttgccatagatgctgcacctagagcgtccattgtttgataaccttgtgatataccttcaccaaatagatttttatctatcatatgctcaggactcataggtcctgctggagaaattataccctttactattaaaacaaataatactaataataacgctggagttaaatacttacctattatgtctataaccttagaagacctaatagtaaatgctaaagttaacccaaagaagattattgaaaatatagctttagctactggtccatggtctccaaatataggcataatacccatttcatatgttgttgcacaagttcttggtattacaagaagtgctaaacatgctagagcagctacactcattactcttgctaaccctttaccagctctcctaagtacatcatccatgcttcccttgcatcttgctgttgctataataacaagcattgctataccagcatctgcaacaacaaatccaataagaggaattaaccagtctttgccggattccatccctaaaaatggaggaaacataagatttcctgcaccaaagaacatagaaaataaagcaaaaccaactataaaaatatctctcatctgcttactcacactaaattaccccctttgaaaatattttgaatattaagataatcttactttattttcagaaaaatgtcaatctggtaaaaattcacacattgttaacgttttcccaatttattttatgaatatttttttcattttatgataattcccatcaatttcgttaaatcaattgcttgtgacacatcaaaaattgctcctctaatctcatctataccaatctcaattccctcaatattattagtggtaaaatctatgccagaaagtttagttccattaaagtttgctttttttaagtttgtatactcaaatactagattgtcaccttttacttcttgaaatacagaattttcaaaatttgaatctaagatagaaactatcttaaatttagagaatgaaaagttagaatacttacctaaaacatccttgaacaaaacgtttttaagtatacaatcatcaaatctaactcctatcaatttactatttttaaattcaactctgtatatacttcctccatcaaaaaatgaatttgataaattgcagttttcaaataccacatcaagtaaatcaatcttttttaaattgcaattttcaaaggatacatttctaaatatacaagattcaaagctaactcttacagaatctaaatcacttataacttcattttctataattttattaaatattttttcatcattaaatatatcttcaagtatatcttcaagattttcaataatttctaattctcctgtaaatttaggtttttgcactttaataattttagtcattttcccctccactataaattatattatttttgatattattttttttaatatattaacttaatatacatatttgatatattaaaaagtttttacgaaatatccgtgtattcagtacttttataattatatcacaaactcatttataatagacttctatataatagtataaaacaagttagaataattgacattatacttatacatattcaattattgaaaacagtaattcttgccaataaataaccttaattttttataaaatcgacaaaaaaacgaataattttattatatttattgtaaataatacaatattacgatataatacaacagaaaaacaaatagaaaatgttcatataatattagtaatacggtctaatagtttctacaaactcaccttaaatgggttttctatgaatagaatatcaactttgaatatatgttctattctatctatatgaatatatatttttttgtttatatcttaaagttttttggaggtaaaaatggtaccaaacactaacaatgtacaaccagatggaaataattcatcattaagctttttagacaaaatgtttaaatttagcgaacgtggctctagccttaaaacagaagtaataggtggagttactacattcttaacaatggcatacatagttttcgtaaatccagcaatattatctgaagctggaatggataaagccgcccttataacagttaccatactagctacagccattggtacacttatatttgcgattttaggaaatgcaccatttgctctagctcctggtatgggattaaatgcatttttcacatactctttggttataggtgcaggaatcccatggcaaacaggtcttggggtagtttttctatctggatgtgtcttctttacactcgcagtaacaggtcttcgaaagacaattgcagacgcaattcctagagaattggcagtagcatcttcagcaggtataggtcttttccttgcttttgttggtttaaaaaatatgggtgttataatagctaatccagatactatagtttcacttgcagattttacaccaacagttttaatagctctttttgctcttatcttaatggcaatactagaatataaaaaagttaaaggtggaatattgataagtatagtagttgcaacaataatatctgttatatttggatttgtggagttgccaacagcaataatctcaacacctcctagtatagcaccagttgcttttaaattagatattgtaggtgcattgaaattctcattaattggacctatattctctttcatgtttatagacatgtttgattcattagcatttcttattacttgttgtaaacaaatgggtcttgaagatgagaatggtgaaataaaagatttaggaagaatgttatatgcagatgtttcttctactttaataggctcattcttaggaactagtactgttacaacatttggagaatctgcttctggtatcgcagcaggtgcaagaacaggacttgcttcaatagtaacagcagcattattcttagctacacttatatttacaccattgcttggtatagttcctacttacgctgcagctcctgcacttgtaatggttggtgtattcatgtttgaaagcataaaacagattgattttgctgatagcaaaatagctgtacctgcttttgttacagttttattgatgcctttaacttatagtataagtattggtttatgctttggatttatttcatatataataatgcatgtggtagctaaagaaactgataaaatcagtattacactttggattataggtttacttgcagttgtaaacttagttctaagttaatattttaaatagttctaggtcaatattttaaatttataaatagcaaaatcaatttatgtataaattgattttgctattaactttgtatagaaaatttattatcataatacatagatataaaaatatatagaaaagaggttgtacttatgtcacaattacttataaaaaatgcatatctaattactatgaatgcagatagagaggtatatgaaactggaagtatacttattgaaaataatattataaaaaatgttggtaagtttgatattaatattgtagataaagatgctgagatatatgatgctaaaggaaaaatactaatgccagggttagtcaatacacacgttcacttatcccaacaattaggacgtggtcttgcagatgatgttgtacttttaacttggcttagagagagaatctggccatacgaaagtagcttcaactatgaagattcattgatttcatctactgcatgttgtgttgaattgataaaatctggggtaactacatttttagaatctggtggtcaatatgtagatgctatggttgaagctgttgataaaactggacttagagcctgtttagctaaatcagttatggatacaggagatggtcttcctgaagcatggcaaaaaactactgatgaggaaatcaacactcaattagacttattccataagtttaataacacatctaatgagaggattaaaatatggtttgcattaagaactatttttaatacaactgaagaattgcttattaggactaaagagttagctgataaatacaatacaggtatacatatgcatattgctgaaatagctgatgaaatttcatttgtaaagcaaaacaacggagttggaacagttgaatatcttgataaactaggtgtattaggaccaaatcttttagctgctcacacagtttggcttactcataaagaaattgatttatttagattacatgatgtaaaagtttctcataatccaggtgcagctatgaaagtagttctaggatttgcctcaattcctgaaatgttagaaaaaggaatacctgtttcaattggtactgatggagctccttcaaataatagaatggaccttatgagggatatgtatcttacatcactaatacataaaggtagaactttaaacccaactgtcgtaccagctgaagaagtcttagaaatggctactataaatggagcaaaatgtgctttactagaaaaagaaattggtagtcttgaagtaggaaaaaaagctgatatgattattctaaatccagatacaattcattgtttaccaatgcataatccaattggaaatatagtttattctatgactagtgaaaatgtagattctactatttgtgatggtaaatggttgatgaaggaaagaaaagtattagttgtagatgaatctgaattattaaataaagttaaaaaacaagcttctaaaataaaagataaagcagaagttaaaattccatctaaatttaaaatcataaaataacataaatttcaattgttttgtaaatatgaatatataaatatatttatacacatcatatatacaaaacaattgtttttttattttatattcattaacattgctcataaaatacaccataattccagaaaaaataaccaatcagttaggattacatcatctaagcaatatataaacgtcttagtttataagttttattctactcttatctaaaaccatctttaaagagttttcaactgtttcaattacatctttataactcaagtacacatttgcgtagatacaatcttcatataaattatattcagttactctacaatacagcagttttcctccatctaataaattgctcaaaatatagttttcttttcttgggacatagcctattacatatccagtttcaccaactattttaatagctttttcatcatatagattatctttctctctagttaaatagtatatcttactcttctccaattctttttcaagatattctctatttctaaaccttgaaccagcaacagctattgaagtcaaatagatatccttaccatgttcatctacttttattttttcaatatttacaaattctttttttaaattattactttcatataatactcttcttaattcatccttcaatataacatttttttctttttcatacgcttctttaacaatttttaattcttcaagagatagtttctctctgtatctttttaagatatttatggattcttttcttacttcatttatatttccaaatattccttttaaagatatattctttccttcaggatatagtgatttacttcctttaagcacaataaaaaataacatatcatcataatattcttgagtcaatttatctttttctatatctttcatttttccaattaaatcatctattttaaacgtctcttcaaaaaaatttaataattttaatctagaacttgtcgttccctttttagatatatgccaatatacctcaaaatctctaatatctctattcagatatggcaacaagtcatcaaaagataagtttacatcataaatttctgacatttttataatatcttctgtttttccactagcatctcttaatgcttcaaaatatatatttttccatttttcactgagcaagatatcatttatttctttttcaaattcaatcttattgtactctatattttcatcttttaagacgtttatagctattaggaaaattgaatataaactttcaaagttagtcccataatttactacagtaggtaaaaatcgattcactaattctaatttattacctatatatttaaattctacacttagcaagtaattgcatataagacgtgctaaattatttatcttttctttatctaaatctcgtttttcaagatattcattcaaatctacaattgaaataatatagttcatcaataatcgttcgtactttgtatccttataaccatcttcaattagataggaatttattttagaatctaaattttccatattaacaatagcaaatacttttattgaacctgtagcctttttagataaattaaataaatatgtattgtaaaattcaagttttttaatagtattactcagataaaatacgtattctccagatttagaaaatgtatctacaacttctcttaagttttctacatttagatatttctcacttaaaactaaccctagttttacatactcaacttttttactcttatatattaattctttagttaatttatataaccatttctcatcaataatcatttcttttaccaaagtatttatctttttcataaaaatttcgaaataacaaattaaagacttagaattactatcctccaataaataaatttcattagattcacttttatacatatttaaaatttcatctactagattatttgcaagttctacttgttctcttaacggtatactttcatatatacataggtaattcatttcaaatgattctttgtatccatcataaccattaaattcctgcaatcgcttaaaaacattctccaccaaattatcctcctttacatgatgtaatttatattgattatactacttatttcgtcaagtttacatttatacgcaaaaaaatattactagaaattgaaattctagtaatatccttattattaattatgtaaataccctatcttataactgtaaataatatccttattaattttaattacttttaataaaaatctatcctagatttagacttctctatgcatatattatactaatattagacatcataatcatacactttttctttttcatatctcatgtttacaaacaatgcaagtaaaattccaacaaatgttattgccacattaaacaatacaacatattttggtccattaactccccctgattttgtaataatacctgctatatttaaaataacatagtttgctatactagatgcaatcataactatagatgttatttttcctttattagttggaaacatttcatttgcagttgacgttgttaactgaagaacacctcctgctgctgaataacctattacaaatccccctaacatacaaatagttggagtttgaacaaaatatacaattaatagcataagtaaagctattataggatatataactaatattcttattggtttaatatattttttaataagtaaagaagttattaatactgcacatattactcccattgagtaaaaggattgaatttttgtagggtcagccatcccatacaatttacccaattcctgattacaatttaaccataatacaaatgtagatgtacatgtaaatccaatacaaacaagagctatacttgttggtgtaaatttcatcttctctgatttaactgttttgcctttgttatcaataacattattagctggtggaaatggtaacacagctatcaaaatggcatctactacaataagaatcgctgttactataaaaataactttaaatgatattgaatttgctgcaacaaatccaattataaaaggaagcaaaaattgtgctaaagctattgtaaatttagtaaacatatttgctattgttcctaaactagcaaatatctccatacaagaaggagttacacaggtatctaagaatgaatttgctgcccctccaattattgcaaatacatatgctatataaaaatttggtgaaaatacaattccaacaaagaaaattgcatgtagaaagtttcctataagaccacttacttttcttccatacttatctgaaataggtcctgcaaatggataagatataagtctccctaatcctagtgcagcaataacagctaaaacaatacttacatccaatgttccatctgatagtgttttagccccccacattgatgaaaattctggtttgtattgtcctaaaattgaaattccaataccaagtaaaaaatatgaaaaatacaacgctatggcagtaggataatattttttattgttcataatttttctcccattcttgttaatttattaacatttttgtgtacaataaactcatcctcataatggatttaaagtatagtcagttaaagcttcaaatttaactggactatgatgcaaaacccactatgacaatttgtaatttattattaaaaatattgaaatacgtatgttttttcattgtttaagatatcactcttatctatttaaagcataattcattaacttcttctacaggcatttctaatccagtatatagattaaaagcttctgctccttggtataataacattcctaatccaccaatagccttacatccattagcttcagcatcttcaatcatttttgttttcttaggattataaacgacatctgttactactaagtcttttcttaaaacactagtatcttttatatttgtttcattgtcataaggcttcataccaataagagttgcatttgtcaatatatcacttgattctatctcctcataaagtttgtttgtatcttctaaatcatatagattaacaacacattctggtacatctttttttatattctcaactgtctgctctgctcttttataaaaatcatccttagcattaaagatagatatttctcttgctccatctaaagcacattgtacttgtatagcagttgctgcaccaccagcacccataattgtaatctttttacctttaacttctatcccattttcttttaaattacgaacatagcctactccatctgttatatgaccaactaactttccattgtcatttacaattgtattacatgctccaattatacgagctgctggagaaagttcatccatatattctgtaacagcagatttacatggcatagtaacattggctccttttatattaaaagtttttattgctaaaagtgcctcttttaccttatctactgtgatatcaaaggctaaatatctataatctaaatctaatttcttaaaactataattatacatcactggtgatttagagtgaccaactggtgtacctattaatgcaaataatcctgttctacctgaaatttccataactataatttcctcccaatattatcattttctttgcaaataacctattcagttatttacaaagaaaaatttatttattatttatatatttaatgctacttcaaaagcttcttttgttgcatctaatgccctacgagcttttactgcatcaccaacaatataagtttcttttacaacttcttttataacttcacttaatgggtcgtaattacgagaacccatagcaagtactactgaatcaaaaccttttaaatcatgctctgtgccatctgtaagtaaatagtcgacaccatcatcataaaatttagaaacttttgcaccagtaatggtatgtatattataattttcaaaatcattcataaggaatttacggtgttctgaaattacatctgcaccaacttcttctctaagctcaataacagtaacctcatgttcttgttctccaaggaaggctgccacttcacatccaaccattccacctccaacaacaagtacttttttcccacaagattttttaccatcaagaaggtctacagcatgaattaatcctgaatcattgattcctggtataggaagtacaagtggagttgctccagtagctataataactacatcaggtgatttctcctttataagttctactgtagcttctgtattagtacatatttttacaccatattgattacattttgaaatataacttctaactaagttagtaatatctcctttccctggaggatatgcagctaaacgcatttgcccaccaagaacttcagatttttcaactaaagttacattatgtcctcttttagcacatacccatgctgcaagcatacctccaacacctccaccaacaacaagaacttctttgctaatttcagctggcttaagctctgcttcatgtcctaatataggatttgcaagacaggctataggttttccttggaacatatttggtacacatccttgtaagcatgcaatacatggtatcatttcgtctagttttccatttttagctttattaggcatttctgggtcagccaagctttgtctaccgaatgctactaaatcacatcttccttgtctgaccattaactcagcaaactgtggctctgtataacgtccaactgttattactggtatactaacagctttttttatttcagtaactaattctgcactgaatccagcatgtaaagtcgtaggagcccacatatattcatcatgtatatgtatactacgtgaaacatgaagtccatctattccacaaccttctagatatgctgctattactgaactatcatgtatatcaattcctcctggaacatcatcagtgctgtttatacgacataatattgctagagaatttcctacttttttacgtatattttcaatgataagacgaggtaatctcattctattttcaaaacatccaccaaactcatctacacgcttatttgttctttgtgatataaaactactaaccagatatccatgagcgcagtgaacttcaacagcatctgcaccagctttttgtgcacgtaatgcagcatctccataagattctataagttcatatatttcttctgttgttattgctagtggtgtattacgaccatttgatgcaggtattgcagaagcagcttttaatggatgtcctgctactttttcatttccttcagaaccagcatgttgtaattgtatagataccttcgaacctgcatcatgacaagcatctattacatttttaaaactatctattgtgctatcatcatataaacaaggcttacgaggacctccttttgcttttttgtctacaacactagattctatagttattaatccaaaaccacctaaagcacgctcaagataataagccttagaagtttcacttaaagtaccgtctgtgtttgcaaaattgtttcccatagggggaactacaaaacgatttggaactgtcattgaaccaattcttataggtgtaaacatagaactaatcttcataaggttttccttcctttcaagttttatatttaaaagttttatattataatactctgtatatttttatattatataagtttattttggagatacttcagaccatgctttatccaaaacttttttagttgcattaaatacagtttcagcagcagtggataaccctttagatattagagaatcagatattacttctgcccctatgactcttggtgatatattgtgttcttttattattttcacaaattcctctgtgtttccatatccttcacctggagccaaacggtcatgtagtgattcatccctaagtttttcataaggagtttctaaaacatcacacacttgaattgatactatcttatctgctggaacaggtgcaaggtcctctgctgtctgctttgctctagcccagtgccaagtatctaatataagcattgcattttcacgattacatcctttcacaacacgccatgcagtagccaaatctggtacaccactatatggcataaactcaagacctataataagttcacctgctctgtcacataattctcccaatgcagttataatttgttcttctggtatcatctctaataatccacaatttatatgtttaacattaaataagtgagccatatgataaacattttgctctttttctctttgagcttcagttctatcttcttctgttccccattgagttatatattctacttctgtaactttcatatcatattcattaagaattgcaatcatttcttcatctgtaacacctgcattttttgcatcaatataattttcagcacgcaatccaataccatcaaatccagcttcttttgcaatacgaactctatcacggaatgaaacttctgttcccaatgtataagaactaattgtaattggaatattaagatttttttgattattcatagcttaaatttgccccctttattttctttataattaatagtatctttgattttatatttttatttatcctactagtagtattattttaccttaaaaataaaagtattttttgatttctatttatctagattttataaatttattgtatcacgagactttactaataacaaattgataatttcctattaattcatagattttgtttatagattttatttataagataattcttgtatttttctattaggttgtataaatatatttatcttataattcagacaaaaaacgataaatttttttaaaagcttttattcttactctataatcatatataataaaaatgtaaaaatatcttaaaggttaacttctacaaatatataaataaaaatacctatgaaaggatgaacaaaaattgaatttatatcacttacgctattttgttacattggcacatttagaacactatacaaaagcggcagaaaatttatctataacacaaccaagcttaagtcatgctatttctttactagaaaatgaacttggggtggctctatttgaaaaagaaggtagaaatatagtccttactaagtatggaaaaatatttttaaaagatgtggaaaaatcattagaaattttagattcaagtgtaaaatcattaaaaataactggtactggtgaaggacaaatagacttagcttttcttagaacacttggtactgattttatcccagacatagtgcataaatttttaaaatctaatcctgctaaatcaatagattttaaatttcatactggtgtaactactgacattattcaaggtcttaaagaaagaaaatatgatattgcattttgttcgaaacttgaaaaagaaaagggaattgaatttatacctgttgccaaacaagatttagtactaattgtaccatatagtcatccactagctgcaaaggatactatagatttaaaagaaaccataccttatcctcaaatagtatttaatcagagaagtggtcttagatatataattgatgatatgtttaaaaaaataaatcaacagcctaatatagtctatgaagtagaggaagaccaagtaattgctggattagttgcaaaaaatttcggaattgctgtagtcccaaatatgaatatgcttagctttacaaaagtaaaagtaattcagattattcacccaagttgggaaagaaacttttacttagcatttataaaagatagatatttgcctcctgcaattaaaaactttaaaaactttgtcattaaaaacgctcaattataatttattaataaaggggttatttttaaatatcctcttttattctttttataaaataaaaaaatctatacttttaaaagtatagattcctaactgacagtcggcatccgagtctcagtaattatcgttatacaacagcaactggattcagttcctgaataactaggttatttacattatatcagatttttttaaatttgtcaattgtatctaacgcattttttcaagccatggtccaacaggctctacaataggaacttctttaaatccccaatttcttatatcattcacactcgttggagtatatattttgtttctgacagatttgaatattttgtttttttctccatattgcatacactttggattagcttctattaaccctcttcttgctctgctaagaggattacataaaatatctgctatttctaaaccttctctatagtcagcatcttcttttttggcaattataaaacccttaaccttatctcttaattcttcatctatatctaagtatattgttccattattaaatacatcaaaaaacgccttttgtacttttaagtttgagacatcatcccttgactctataactattcgtgcagattctacagtttcattatttacaaatgaataaaaattctgaagaacatgtataaaagccacaacatacggttcctttgaaggtgcataatatttctttaatctagctttatctactgttactgatattatagtacactctaatctagatagaaataaaggcaactcatcatagaataacttaatctgtgaatcatcaaacttctcaaatgctcttgattttcttgatatatctgtcaaatgtattcctatgttactggttccaaaacaatactctttaaatgcatccatttctttcctcaaagaacatacataatcgccttgacttactgcatatttatattcaaaaattactcctgtcaatgtaaatgggtcttcatgatttatatcagctcttccactttcatcaataaacattatatattttttctttataatcttactcaccctcttaacatatgatgatagcatctatattcattttatatgagttttaaaaatattccaagatttttatataacttaaacttaattttatactaaaaaattgagatgtaaaacaatcaagcttttattgattgaatttcacatctcaattataattatttttcaatatatatttttactattttgcaagaatatccattaatttatccattactatataagatactccgcctcctatttgataaggagtttcaacttttttatttgcaaatactctttgttgctctaatgataatcctgaattatccattaaaactattggtgaatgtaattttacagctaatggtccagctgataaagcatctactaaagcatctgatttactaactaatacagcctgtaaatcagtatctccatagaatttttctattactttggcattagtatctactctactatctccatatattctatttcctgaaatatcttcagtagttatatcattcatttttgctattactgaatcgttaattgcacttggtccacctataaagtatgcattttctaattttctttctgttagccatttataagattcttctgtaattccatctttattgactaatattataggttgtttttcttccccagctttagaagctacagataaagcatctgcttccccatttccagaaaccatatatgcagtttttatttcttctcgatttccaagttcttcagctattcttgtagcagtttgatatctatcttgacctgctattctctttgtctctgtgttgaaagtagtttttatttcttgctctaatttagaacttattgcattttctccacctatcaagattactgttttaggtgctaataacttcatttcttcaacagtttcagttggtaaattagctgtattagtaagtagtattgttgagtcatagctacttgctaaaggagttgctgttataccatcagctattgcattaccatttactaatattacagtatctgaactatcagcattccagtttccaactgaacttatctttttagctgtatcaaatctatttgcacctataattgtatcccatgtaggatttatagttccatcttcattaaaagtataatctttcccatctattttttgagaaccagttagcatctttccatctttgtctaaatagtaagacttaccatctatttgttgccatcctgtctgcattattcctgttttgtcaaagtaatacttattaccatctatttcttgccatcctgttactgataaaccatcagatcctagatagtatttctttccattcttttcttgccatcctgtttgcattactccatctgagttaaagtaataagtttttccgtctattactttccatccagatactcttgctccatcagttcctaaataatattttttgttattaattgctttccatcctgtttgcattactcctgaagcatcaaagtaatacatttttccatttacttttagccaactattcttttggtatgttccatcagattttacataatacttcttaccattttctgttttccatcctgtttgatttagatttatcttatattttgccgctatctttacatagctgtcattactataatctataattacatctgaacctacaggaacttggtcaaataaccatctaacatctttattgtgcattcttatacatccaccagaaatatgctttcctatagaactctcattattatttccatgtattccatatgtatctccataagttccttttaatgctaatcccatccatctatctcctaatggatttcttggacttcctccaggtatattacctttataatatggtctattttttatcttgttaactacttttgttttccctgttggtgtttctgacccctttttacctgttgcaactctaaattcttttacaagtttattatttacaaaatatcctagagtattctttcttgaatttactataatcacatgtttactggctgcgcttgattctggtacgccacatgcaaatactaaaactaaagtcagtgctagtactaaatacttttttagactttttttcactataacttccccctcttttagaaacattactacatgtgtctaattataacataaaattaccaataccttatatttacaaatttgttacatttatacatataagtatgtattctactcttcatacccattaggattcatactttgccatctccatgaatcttcacacatctcttcaagttcatacttagctttccatccaagctctttttctgcctttgaagaatctgcataacacatggctacatctccagcccttcttcctacaatcttatatggtatttcttttccacttgctttagaaaatgcttttactaaatcaagaacactataaccctttccagttcctaaattataaacaacaagtcctggattttcttctaatttttgtaatgcttttacatgaccagcagctaaatctaatacatgtatatagtctctaactccagttccatcatgtgttggataatcattaccataaacactcaattccttcaatttacctactgctatttttgttatataaggcattagattgctcggaactccatttggttcttcacctattctaccacttttatgagcaccaactggattaaagtatcttaaaagagctatatccaatgacttatctgcttttgatatatctactaacatctgctctatcataagtttagttcttccatatggattggttacagaaagtgggaaatcctctaatataggacaagtatgtgggtctccatatacagtagctgaagaactaaatacaaactttttaacaccatattctctcattaattcaaataaatttaaggtacttattagattattgctgtaatattcaattggtttttctactgattcaccaactgcttttaaagctgcaaagtgtataattgattcaatattattttctttaaatacaacatgcatttcatctttatttctgatatcaatattataaaattttactggttttttagataattccttaattctatcaaccactattgagttgctattacttaagttatcaactataacaacttcataacctgattctaaaagttctattgctgtatggcttcctatatatcctgctcctccagctactaaaactgccattgtaattacctcttttctaatattttatttttcacttactttttttctcatatagtccattaaatcatcttttaaattttctctctttagagcaaagtctattgttgcctctaaaaaaccaatcttatctcccacatcatatcttctaccttcaaagttataagcataaatagcctcttgttttccaagagtttgaagtgcatctgtcagttgtatctctccacctttaccaggtgtctgtttctctaatatactaaatattgcaggagttattatatatcttccaagtatagctatatcagatggagcttcttcaattgcaggtttttcaaccatatctttaactttatatactctatcttcgatatgttttacatccaatataccatatttattagtatcttctttagctatcttttgaacacctaatacagttgttttatactcattataagtatctattaattgttttaagcacggaacatctgaatctactatatcatcacctaataatacggcaaaaggttcatcacctataaaactttttgcacagtaaattgcatgtccaagaccttttggctctttttgtcttatataatgaatatttaccatatttgatatgtctcttaccatttctaacatctctgtcttacctttttgctctagttctaactctaattcaactgatttatcaaaatgatcttctatagattttttatttctacctgttattataagaatttcttcaattcccgattctatagcttcttctattatatactgtaaagttggtttatctactataggaagcatttctttgggctgtgattttgttgctggtaaaaatctggttcctagccctgctgctggtattattgcttttttaactgtcatctgcattttttcacccttcttcgtaaattttctattgtaccaaattaatataccatatttatactttttcttcaaactctatattatcccaatatttaatgctataagataatataaggtagatgaaatttcatctacctttagttttataagttaatattgtattgtttatattttatccaaaacttatacaggtactaaatttcatctaagatgccttttatatcactatctatatcttcatctagataagaatctaaatcttctaagtcaacttctagttcttgatatgtcatatcaacactgacatcctcatctatatccatttctgatattaattctcctaaaatactatttccatcagaatctaaaccactatctatatcttcatctatatagttttcatttaaaatttcatctaaatcaatctcgtaataaacttcattatttttttcatcccctgagtccaatcctaagaactcatagttaaaagtccaaacattgtatttacttgacatactttattcctcctgtgaaaaacatattttcatctagtttattggttccataatcaacagagttatatattttttcaattatgtcttttcttctttcttttgtactattatttaatgtcaattgtttaaatacatatgtatttgttattctctcgaataatatttcttttatactatcatcatcaatatttctatagtttttccacaataactcaaataacttaaacatttccctactagtttcatctacataataaggatacatattttctactaaatggtttaatcttgatatggcttgttttaaaaatacatcaagacttgcactttcactttcttttaacattctataattgtatttcttcttatcttctcctgaaattacaaagatgatattgtctaaacttttttcaacttcatttaaataactgcttatattatatgataagtcagacaatagatttttaatctgcttaaacacttgtacatcaagtttagtattatacttttcaaacaaatctatttcttgattttctaatattcttggcatatatgctgacaataaatctaaattgtttctttgttcttgtatttgcttataaagtgaatttataacttctattcttatttcatcatttaactctttttctaaaatcttatcaaattcagatttcatatagtaaatatttccaaaaaaattaaatattatcatatcattcatagctttagaccaattcttatatatcacttcaatagaattttctttaagtagaggttgctttgcatatataaatacatcttgcataagtttttgaaccatatttttacttaagtttaaaagtactttttgattattaaattttatttccgtttctacaaaattagaattttcgttttcaagttctttattaattacaatgtcttttatatcactattttttatagatatgatttctttttgaaaagactttagaatagtcaagctatcgaaatcttcttgaataaaaaatggagcatgttttaatgtatatcccactatttcattttctatatcttttaagtcatctatttgcataatttctctatttttatcatttatatgtaggttaaatacatttttattatcatataatattatatcttctcctaaatttaacttagaacaattatctttcgctgactttacaatagtcttcttagatttcttatttataaaaattaattggtcttgatattttactaaaagcatgtttgtgtttttataatcaaatccatctatatttcctgatatcttgcagaatactatatcacaatctttaggaagatttcctattttttggttatctttaactctctcatttaaatcagatggaactacactatctatattgttattaaatatagatacagaccttactataatcccctctctttccatatgaaagtatcccttcaatgacactcttttatcttctaaaatgtatctttctatatcatcaaaatttatttcaaatctatttttcccactgataaatataaacttctcattatctttattaattccacccatataaaacttattgtcatctaaacttaatatagtcatattatcctttagatagaatataaattctctttgacttttgcagattaaatcatattcatccaaagttattttcatagtcaaatttgctgtaacatttttacttgaattttcactttttatgtaaaaaggcaagttatttccatagacaattatttgagaatcttctaaaactgcctctaatttttctttattgtctgaaaaactatatatatattttacacctgtatcctcattaacttcatctgatttgctgattattatattccctagatttgttatatgaagctttttatattcttttgagtatctacttatgccactaagctcaaacccatcagaaagctcatatatgattttttctcctaatttcaacataccttcaccacctaaacagaattataagtattttataaaggtgaataaaatgtctcaaaacaaataatatttttttaatactttttattctgagacatagtttctccttttttataatgctctaagcaccttcaactatttcttcataaagtttatctaaatgtttaacatattcacgatatccagatttgttctttaactcacttcttaaatcttcatatttttgtttaagttcttcagcactcaaagaaggagctgattcttttaattcttctaacttataatcatagtacttatcatacatagctatatatgtatcaatagatttcttagctagttcattacatttttcttgtgcttctccatattgagaataatcacctatttttattttatagtatccattttcttgaattattgttgaagaaatacctttagcctcatattcttttgctgtttcttttgctgttttttcaactttaagtgaacctgcataaacagtgtaatatacacctttaccatctttatatgcttccatttcttttgctttcttttcagcttgtgctttttcttgagcctctttttcagcttttgccttttcttctgcttcttttttctctttttcagcttgtgcttttttctcttcctcagttaatttattgttagcttgttgttgagttgatgactttggaatattctctttatcatttttcttattgttgcctactgttataaaatatcctacaccaacaataaccactataactactgctataatagtttcttttaatctactcttcttagaaacaacctcttcatcatctaaagaatcttctttatctgatacataatttttcatttctttcttgttttctctatatttgtccttagaagaatttttagattttttattactattttctttctttttaataggtattactactgatttttcattttctaatttttcttcttttatttcttttgcttttttatcttctaagtttttactttctttttcaagcttcgattcattatttgaagatactttttcatctaagttattatttattggtttttctatttttacactacgttcttcttctatatgttgacttggttcttcttgttttatttcttttaattcattttgctctatttcttctgattttgcttgatgattttcaactggtttatctaaaattatatcaggagaaatatcatttaaattctcttcttcttgttcaacttcttcattgtcttttttaataaatccaaataatttagccttctttttactctttttattttctggttcaattatatcttctttattgctgtcgtactctttatctgtagtatctttatcttctacaacgtcacctatatcttgattattactatctacttcttctttagccccttcttcagcatcatcttctattgaaatactacttctaaagcaaatatctttatctgcattttttatcatgtaaatgtattcttcaatatcgatatctttatttcttctagttctttttgatgcaatttcatgattttctaattcactatagttatcttttattagattctgtgctttattccatgtatcttcactaatttctgttttatttttaattacatagtccacaaattccttaaaattttcaggaccaaattctccaattatagtcagtctcattgcaccttctataaggtctctatttcttctctttaaaaattctaatacaaccgttgcacaagcaaaatctttaataatttctttgccaaaaccatatccttcaacagaatgaagttcttctaatccacataacttcttatattcattgtgtattgtttgagatatactttcattatttaagctatttaacttatctataaacttcgattctatatcatttgattttgattcatgttttacttttgaatttttaatttcatttagtagcatgtcattttctgaattatctttacctaattgcaaatcctcaatttcagttgcttttatttctactttgtcttgttcgttattctcttccacattattaggtaccacatctttattgctagctaatattttgtttacacagaatataatttctctttttaattctcttttcgcatctgcttgatttttaagaaataaatctccacattctttcttttctaaacttatttttctaagagatatattaaggaggtctttatataggtttaaaaccttataatccttttctaaacgtcttcttctctctgatagttccattttatcataagctaaaaaactatttaaatcattggcttttagagagtctaatccctctttcatagccttatttacatactttctacattttgctgtagttaattctaaatctttttctaattcatctatttcaggtatgtacttatctactatccatttgccaataagtggttctgtatttcttgctaatgtcttataaaacaatatattaaattttaaaagctctgcatattttgcttcattaaattctactttttcaaatttcttttccaaaacaccatctagcttttcatttattttagactcttgttttaaaaaacttgctgtgacatttaaaacagtgtttcttattatattattttcactcaaaaccttcactccttaaatcaattattttattgtaatatttacattgtgcaaagttgctaatttgattatgatatctaaataattatttactaaatttgctacatcttatatcatatcatattatttacatcattttactttttctttttatatctatcttatattataccatttttaatatctgtactaacttatattacaatattcctcaaaattttaaaagtagattagacaaatttacaaataaaaaaacatcagtttaaactgatgtttttgactatcgaaataattaagcaagtctataagcggagttctgtattagataatcatctttctaggcctattgtcaccaataggctcaagcgacctacctaccggagagtacgagcagcactctttattcctatcttggtcttgctccaggtggggtttacatagccaactagtcgcctagctgctggtgagctcttacctcgcctttccatccttaccacaatagtggcggtttatttctgttgcactatccttaggatcgctcccactaggcgttacctagcaccctgctctatggagctccgactttcctcatgtaagattacatgcgattatctggcttacttaatatttattttacttagttatgttaacacaaattcttttacatgtcaaagtaatattatactaaaaatttaaatttattcaaaaatagtgtaatatagatatataaactccatttaactcgaggtgatatattgaaaaaattatatagaatagtaattaacattatactagtattagtaatactttacagtggatttaatatatactcaaaacttaccaaatacaatcatgatactaaaacatcctcagaacttcaaaaaaaagaatataaaaaagaggatttatcaaagattaacagtgattttaaattttggctttctgttgagaatacaaatataaattatccagttgtacaatctaaagataattcttactatcttgacaaagatttttataaaaaagattctatttctggtacactgtttatggattatagaaataaatctattgatgacaaaaatatcataatatatggacataatatgaaaaataaaactatgttcaacaacctaaataagtttaaagatgctgacttctttaaaaacaataataaaataaaaataaccttgaatggaaaagaatttttatatgatgttttttctgcttatattgtagaatctgattatgattatctaaaaacaaattttaacaatgaatctgattatcaaaattacataaatgatattacttctaaatcattgtataaatctcctattaaggtaaatagcaatgataaaatagttacactttctacatgtacctatgaatttgatgatgccagaatggtgattcatggtagattgatttaaaactcacagacacagtttaaaacaataattttaaactgtgtcatcttttatacctataatttataaattaggccactaaaagtatgtaatacaaaataacaaatacatcaaacaataaaaaacaataaaaaaagactatgctaaaaacatagtctttactggagctggtgataggaatcgaacctacaacctgctgattacaagtcagctgctctaccgttgagccacaccagcacacctattctattgtaaattagtaaaactaatttttaaaagttaacactctaaaaactacacatatatcttaatgaatgaacatcaaataaatattggtcaagtcctcgacctattagtatcgataagctaaatacattgctgcacttacaccttcgacctatcaaccagatagtctttctggggtcttacccttgcggtgggaaatcttatcttgaagttggcttcgcgcttagatgctttcagcgcttatccattccgtacatagctacccagccatgcccttggcagaacaactggtacaccagaggtacgtccatcccggtcctctcgtactaaggacaggtcttctcaaatttcctacgcctgcgacggatagggaccgaactgtctcacgacgttctgaacccagctcgcgtaccactttaatgggcgaacagcccaacccttgggacctactacagccccaggatgtgatgagccgacatcgaggtgccaaacctccccgtcgatgtggactcttgggggagataagcctgttatccccagggtagcttttatccgttgagcgatggcccttccacgcagaaccaccggatcactaagtccgattttcatccttgctcgacctgtatgtcttgcaatcaagctctcttttgcctttacactctacgtacgatttccgaccgtactgagagaacctttgagcgcctccgttaccttttgggaggcgaccgccccagtcaaactgcccacctgacagtgtcccaagaccagattcatggcctatggttagagtcccagtactacaagggtggtatcccaaggatggctccgccaaaactggcgtcctggtttcaaagcctcccacctatcctgtacatgtagtaccaagacccaatgtcaagctacagtaaagctccatggggtctttccgtcctgtcgcaggtatccggcatcttcaccggaattacaatttcaccgagtctgttgttgagacagtgcccaaatcgttacgcctttcgtgcgggtcggaacttacccgacaaggaatttcgctaccttaggaccgttatagttacggccgccgtttactggggcttaagttcactgcttcgattgctctaacagatccccttaaccttccagcaccgggcaggcgtcagctcctatacatcgtcttgcgacttagcagaaacctatgtttttggtaaacagtcgcttgggcctattctctgcggccacctgatggtggcaccccttatccctaagttacggggtcattttgccgagttccttaacaacagttctctcgctggccttaggatactctcctcacccacctgtgtcggtttgcggtacgggtacctttaacctcgatagagacttttcttgacagtgtgaaatcagctacttcgctactaaatttcgctccccatcacatcccagcattatcaaagcggatttgcctactttgactgcctcaatgcttgggcacacataaccaacagtgtgcttagcttatcctactgtgtcatcccttctctcaaacggttatcggtagtacaggaatatcaacctgttgtccatcacctacgcctttcggcctcagcttaggtcccgactaacccagggcggacgaaccttcccctggaaaccttgggtttacggcctgtgggattctcacccacatctcgctactcatgccaacattctcactcccatactgtccacatgtccttacggtcatgcttcaacccgtatgggaagctcccctacccatcattactgatgccgtagcttcggtagtaagttttagccccggaaatcttcggcgcaggatcactcgaccagtgagctattacgcactctttgaatgagtggctgcttctaagccaacatcctggttgtctgtgcaatcccacatcctttaccacttaacttacatttagggaccttagctgacgatctgggctgttgccctttcgactatgaatcttatcacccacagtctgactcccaagtataagatgacggcattcggagtttgatagtcttcggtaggtgcaataccccctaggacattcagtgctctacctccgtatctctcaccttgaggctagccctaaagctatttcggggagaaccagctatctccgggctcgattggaatttcaccgctacccacaagtcatccccgagcttttcaacgctcgtgggttcggacctccacgaaattttactttcgcttcatcctgctcatgggtaggtcgcccggtttcgggtctacgtcaagtaactgaacgctcagttaaaactcgctttcgctacggctccgcaccttaagtgcttaaccttgctacttaacgtaactcgttggcccgttctacaaaaagtacgcggtcacacaagaaatgtgcttccacagcttgtaagtgcagggtttcaggttctatttcactcccctcccggggttcttttcacctttccctcacggtactatacgctatcggtcactaggtagtatttagccttggagggtggtccctcctgcttcccacagggtttcacgtgtcccgtggtactctggatcatatctgaagtcttctcgtttaacatacaggactattaccttctgtggtgggtctttccaaacctcttcaattacgatacctcttcgttatgatatgtccgcaaccccaataaagaaaactttattggtttgggctaatccgcgttcgctcgccgctacttacggaatcgaatttctttctcttccttcaggtacttagatgtttcagttccctgagttcccctcattaagctatgtattcacttaatgatacttagacattactctaagtgagtttcctcattcggaaatcttcggatcaaagtttacgtgcaactccccgaagcttatcgcagcttatcacgtccttcatcggctcctagtgccaaggcatccgccctgcacccttaataacttgaccagttaaaaaggtttgatagattagaagctatcaacttcgataattttaaaaagttatcagctttatatattacaaattagatgtcatatcactaaatatatatgcagttttcaaagtgctaaaagtgctaattttgagtattcgtaaaaacgaaccctcaaaattaaacagtaggtaattctccttagaaaggaggtgatccagccgcaccttccgatacggctaccttgttacgacttcaccccagttattgattccaccttcgacgacttcttccaaaaggttagataatcggcttcgggcgtctccaactcccgtggtgtgacgggcggtgtgtacaagacccgggaacgcattcaccgcagcattctgatctgcgattactagtaactccagcttcatgtaggcgagtttcagcctacaatccgaactgagagtagctttaagggattagctccaccttacggcttggcaaccctctgtactacccattgtagcacgtgtgtagccctaagcataaggggcatgatgatttgacgtcatccccaccttcctccaggttatccctggcagtctctctagagtgcccaacttaatgatggcaactaaagacaagggttgcgctcgttgcgggacttaacccaacatctcacgacacgagctgacgacaaccatgcaccacctgtcaccaatgtccccgaagggaactctccgattaaggagatgtcattgggatgtcaagcttaggtaaggttcttcgcgttgcttcgaattaaaccacatgctccgctacttgtgcgggtccccgtcaattcctttgagtttcactcttgcgagcgtacttcccaggcggagtacttaatgcgttagctgcggcaccgaagggggtaacccccgacacctagtactcatcgtttacagcgtggactaccagggtatctaatcctgtttgctccccacgctttcgtgcctcagcgtcagttacagtccagagagccgccttcgcaactggtgttcctcctaatatctacgcatttcaccgctacactaggaattccactctcctctcctgcactcaagtctcccagtttcaagagcttactacggttgagccgtagcctttcactcctgacttgaaagaccgcctacgcaccctttacgcccagtaaatccggataacgctagccccctacgtattaccgcggctgctggcacgtagttagccggggcttcctcctcaagtaccgtcattatcttccttgaggacagagttttacgacccgaaggccttcatcactcacgcggcgttgctgcatcaggctttcgcccattgtgcaatattccccactgctgcctcccgtaggagtttggaccgtgtctcagttccaatgtggccgatcaccctctcaggtcggctactgatcgtcgccttggtaagccgttaccttaccaactagctaatcagacgcgggtccatcctgtactggctcacctttgatatttaagagatgcctctcaaatatattatcccgtattagcatacctttcggtatgttatccgtgtgtacagggtaggttacccacgcgttactcacccgtccgccgctctttaccgaagtaaatcgctcaacttgcatgtgttaggcacgccgccagcgttcatcctgagccaggatcaaactctcaaataaaagtttatcaggctcagatactattgttatcaaaatatctggctttatggtttgtttcttgttttataaattaacctactgtttaattttcaaagttcatttcattcaattaacttctttgtgcttgttattttgttacttcttgttgagcacatttattataataacatcttctcataatatggtcaactatttttttcatttttttttaaatttattgattattcaccctttgtcatactattgtgactttatttttaaagatataactattattaatagtaatttccaattataataatactatatgcaattattattaatttagaaaggagcttcaaaatgtttagaaaagtattgcattatttaacactactttctatttctattttttttattgttggatgttcaaattcacaaaacaatcaaaacgaaaatcaaaataaggaaacacagttacaagaagataaggaaaaaatagatggtggtaaggatacttccaatgtaatagtttcagacggaacagataaaccatcaaaagccactactaataatgataataataaattagatgtatcttctttagataacactactcttgattggttttatatacctaacaataagcataaaacaccagaagtaaatacggacattgaatttaaattttctgactatgatgccctatacaatggacctacaaaagatggtcaaaaaacactatatcttacatttgatgaaggttatgaaaatggatacactacaaagatactcgacactctaaaacaaaaccaggttaaagcagttttttttgttacagctccatatataaaagaaaataaagatttagtaaaaagaatggtttctgagggacatatagttggaaatcatagtaaaacccatccatctatgccaacaaaaacaagcaatctaaaaaactttaatgacgaattatatgatgttgaaaagttatataaagatgtaactgggaaagatatggttaaattttttagacctcctatgggaaaatactcagaaaaaagcttggcaatgactaaaaatttaggatacaagactgtattttggagttttgcatacagagactgggatactgataaacaaccatcacatgaagaagcaacgcaaaaaataatggataatctacatgatggttctatcttgttactacatgcagtttccaaaactagtacagaaattttaaatgattttatatcaaatgcaagaaaactaggatatgaatttgaactcttggagtattaatatttagaattacatctaaagtctacaaactaatatagttaatataatatagattataaaataataaattaaaattaaaatttttgtttggtgatagtataggtaaaaaacttgcgatagcttatatatgttggtgggacagggtaataaaacatcaaaaaatttggcaagatattaaacatagataacagtattttagatgttatatttagatgttatgtatagtataatgaaaaatattattttattaaagaatactaataaaaatatcaataaaaatagatgtatggcttaaaattagtaaaacaattataataaattatagctacacatctatttttaatttgtacaattaaagatttattcgatttattaaataataaacattgctactatggttgttacaaccaatccggttataactgggacaaagtttcgctttgccaactctattggactaaccccacaaattgccgctgctgaaataagaccccaaggaactagacagcctccacctacccatataccactgatttgtcctaatgcagctaatgcaccaacacttgcatttatagcagttccaaatacagaggcaagtgaaccaactaatgaaatcccagaaaatccagaaccatcaagcccagttattgcccccactacagtttctatacctgatacggcaaatttattaagtggtattgtttgagaaagagctatgcctatatctgataataaaccttgtgaacctggtgctaatacttttccaaatacacctgtcaagggcgcaacttcacccatatagaaaaatgctgctattggtataattgctccaaatatttttatcccaaacacaaaaccatcaattatattctcacatacattttcaagactatctttgccaaaatttataacatttataattattattaaaaatactgctgttccacccaaaagagctgatgcatctcctccttttaggtcaaatatatacataacaattatatcagcaagaaatcccagagctactaaaatagttgctattttagattttccattgaactcttctacttcttcactttcaaaaccttttagttcttctctaaacattcctttgttaatatctctttttaatgtataaaatgccatagatatggttacgattcccatcacccaaaacaaaatcataccatcatttataacatatgatactgcaacacctgctgcaccagctgttatacttggagctccttgaataacaaagtctgtagacaaggcaagaccatgaccaaataaatttaatgctactgcaacaccaattgctggtagcccagctctcatagcaacaggtaaaaatacagctccaactaaggcaacagctggagttggccagaaaaaccaagaaagaactaacataacaaatccagttacaaaaaatgctgtattagaattttttataactctcgaaaatggtctcaccatatactgtatagcattattggcttctagggctttagataatgcaaccataatagctataatcaagataattggacccaactcatttaaagatataataaaagagttaaacactgctgttatagcaccaaagatgtttttttcaaagaacaatcccataaaaaaaacacctaatatacatggtactattgtatcctttttcataatcatagtaattaatataattaccataaatagaatgtaaatataatgtgctcctgtcaaaaccatattattatgtcccctttttttaagataataatattatatggtcttgtaagtaaacttgttacttgcctagaggtacacaatattgaacatcccataactaaagtcacatgcttcctgcttcatagaattttacataagcaattacacaatatataatagcaattacacaatatataatttaaatttttatgattcttttgctggaatagatatttcaatagcaaattctttatcatctgaatttacatttatgcttccattatgatatgcaactattttctcacaattctttataccaattccaaaactttctacattcttagaaaaattacttactctatttttttgtataattagtaatttagaatcctctactttaattaaaaatactataggcttatctttcctagcatattttattatattagaacataaattatcaaatatccttctaaattgtgtaacatctacataaatatgatattggttataaagttcattttctattgttatatgaaatcctttctcctccaatgtatatgaactatctaaaagtaattgaaaaataaattcattagcatttattttttcatacccttttgaaacttcctctccagaattaacaaaatgcgtaaaaaggtcatctgttaaatcttttatttgatatgctttagaccttacattttttatgtattgttccaattgctcaggactattgtatttatggtctttgatcaaatctaaataacaaattactgatgttaatggagttctaacatcatgtgatatcgaagttactatatctttatttttattcttcatctccctttcttttataagttgattctccaatgtatgactcatctcattaatactagatgcaagtgatgataattcatcattaccttttactgggattctatactttaaactgccactctctactatctttatacccatttctattttccttaggtactttatctttctactaaacaacagtaaaaatgttataataaatgtaagtgccataaatgtaatagaaattgcttctataaaattttgaaatctaaatctaaataaagctactacaactatattagctttaatatcagaaaattgtatctcatagtttctagccatgggactgctataaaactcattttcctcactcttatcaggtacttcattaggatagtataatgtatcataaaaaaccttatttcctttatatatcttcatagaaacaaaccaattatcactattccattttgctatatcatctccatcatctgctcttataccattgttattcacataagtttgaaaattatccataagttgatttacttctcttttaaaatatactttcccttctgatacatcttttactatagattcaacagcagagtaaaatggtatatttaaaatgaaagccactgcagctgagattactacatatatcaatagtataactcccaacttagatggcttaattttgttaatcaatataatacccctttccccatgcggtttttatatattgtggatttttttggtctttttctaacttttttcttaaatttctaatatgaaccattattgtattatttgccgtataaaaatactgctcatcccaaatagtttcatataaattttcagacgaaaaaactttttttctatttttcaacataagaattaatatactatattctatagttgtcaaaaacacaggttctccatttagtgtaacatcttgagtatctaaattgacacataactcttttgtttttaatatatttggctctctttccttttcctttccctggtatatataataacgtctaagtagcgacttaacccttgaaattagttcagaatatgaaaaaggctttgataaatagtcatctcctcctgctgaaaatccaataactttatcagagtcttgagtttttgcagttaaaaataatattggtgctgtcgttttttctctaatttcattacatgcaacaaatcctgtttttacaggcattacaacatccaaaataatcaaatcaatcgtactatctactaagtttacagcttcttctccattcgttgccataataacttcataaccttcaccagttaaaagtatttctacgatttccctaatctcaggattatcatcagctactaaaattttttttggaatctctttattcatcaccaagctcctttttttgctatatttcttaaatatttcaaactatataaaatattatactttattagcaaaagcttagcaatgtcacacgttttaatagtttatactcctgtaaacatgtttaaaacttaattaaaatgtacacacaaattgacatattaataaaaataatctatataatattatcttacataagcaacttttttcactgcttttactttttcagaagattttacatgtactactatacatatcaatccacttatagctacaaatgcataaaaacttattcccctactaagtaacattgccggaactaataagtgaccagggaaaaatatcttaaataatgtcataaaactattttcagaagctccaacagcccctggcaatggtaatgaagaaacagcaatattaagcaaggattgtatcgctaatatctcaaatacagtatatgttgatagatgaaaagctttgtatacaaagaaaggaactaaaaacatagctgttatttgtacaatagttatgactaaaatttggactacaagttttggattctgctttatatattgagcacctttaacatactcttcaatttgagatattataacttttcttgaactttcaacatcttttattattcttaacttacctaataaatttgttattgatattataaaattgtttacaagtttttttgaaaatataattgcaattactccaatgacaagagcaacatttgttattacaccatatattagtaaaatgttcataccacttacattatttaatataaactcacgttccataatgaacattattccactatatgccagtataactacttggtgaataacaacaatgactaatagtataagtgaagaatatgatatatttatatcgtcttttttcatataataaacttgtgctggttgaccacctgatgctgaaggcgtaatagaactaaaataaaatccaataaaagcatatcccatacattttaaaagagtagttttttggtttaaagctttcatacctaagtatatatttataccttcacaggcaacatatataaacatcattgcaaatccaattagtataaacatagggcttgcaccttttaatgattttatcaatgattcaactgactgccctctaaaaacaaaatatcctgttatgcccattagtaaaactaaaaaagctacactacctaggcatttatttttcttttcagttttacttatcataactacatcctttctggtgttacgaactttaaaccactggctttaagttttggaatagctatctttaaagcttcaatagtacgctcaggtgcacctactgcaccacctgaattttcacctgcatcatgtaaacaaattatagaattttcttttgttctactcattaacttgtttataataatgtctactgtactatctttctcccaatcttctgccattacatcccacaaagtcatttttagattatattttttaacaaatgaatttgaaaatatattagtatgaccccatggtggacgatagtagtttacatctacacctaaatttttcattatatttgtactttcaataaaatcttttttaacataactataactataaagccatgcatttctgtgttccaatgaatgtaaaccaactatatgattttctctcaacattctttttataatttcaggctctttttcagcattctttgctactacaaaaaacatagcttgtatatcattttcttttaacacatctagtaatttttctgtatatctcttatctggaccatcatcaaatgtaagtgcaatttcattttctccagccatattttttaatacctctttatttaatagtttattatagtatgtaggtataattgaatggactaaaaaaatcaatgcaacaacgataattaaacctactacatacattctctacacgctccttgttcatcaagtgaaaataaaatattctctaaggtattattgtcaaattgtttttttaattctttcatgttactgctcatttctttaagagtagcatcatcataaattaaatcttttatctcatctacatagtattttttatttttaccaagtattctcccaatttcattatttaatataaaactagcattatctatctcttgttgtaaaaatggattaaatgccaatattggaagttctgaataaattgtttcaaatagtgttattccacctggtttagaaataataaggtcagaatctttcatatatttatatacttcattggtgtaacctactacctctatattttcatatctaccatatagtttatagtacatttttttattattaccagttattacagtagtttttactccttctaaactatttaattctttgtaaaattgttctgatttaggcagtaatcctaatcctccacccattataagaatattttttttagttgaatgatttacatgttctattcttttaaattctttttttactggaataccattaactttaatcttagattcatctattcctttaaaaacaagttcttccttagtagatttactagctactaaataacagtctgtatttttactaatccattctgagtgactacttatatcagttatgcatgttattaaaggaagatttgagttatatttttccttatatcttgatactaattgagaacaaaatggaaaagttgaaataactactgttggttgtacttcatgaagtaatgtatctaatttatttaaaaaataatctgaaaaagtaaattttatatctttctttccattttcagcacatttataaaacaaattataaagactacttccccgatttacaagaatagaaaaagtcttgtacattttatctgaatagttaggcataatgtattcaaatatatctttaattgttatttctgaattatcaaattttgcttttatatcttcacttaaagaatttgatgctgagtaatgacccataccaaattttcctgtaagaattaataccttcataagattccctcctcgttaaagcttttcttttcatatgattactatacttataagtatagactttaaatctttagaaaaacctagtataattcttaagaaatcttaaagttttaattaaaaaatacaaagagaccatctaaaaatagagataaccatattttttattatttaaataacacaaatatgttcgattccatacaaaaaagtgcctcataaactaaaaagttcattttgagacaccttttttatatctaaatatattcaaatacatacacaatcattgtaattatttaaatgtattttatttagttgttctttataattaatccataatattatattcttcatataaaggatatttttcagttaaaccaacaaccaatgttctagccttagattcttcatcataagttaaacataggtctatagcctcagcgattattgccatatcttcttctttcatacctctagtagttacagctggagtaccaagtcttattccacttgtaacaagagcaccatttggatcaaatggaattgtatttttattagctgttatataagcatcatccaatctcttttctgctgctttaccagttatatttttattaatcaaatctaatagtattaaatgattatctgtacctccagaaatcaatttaaaatctcttttaataagttcttcagctaaggcttttgcatttttagcaacttgtacctgatattctttaaactcatcacttaaagcttctttaaagcaaactgccttagaagcaattatatgttcaagaggtccaccttgaataccagggaatattgctttgtctatgtctttagcatatttttctttacaaagaataacacccccacgaggtcctcttaaagttttgtgagttgttgttgtaacaaaatcagccacttcacatggattttggtgaataccagcagccacaagacctgctatatgagccatatctaccataagcaatgctccaacctcatcagctatctctctaaactttttaaaatctatttctctaggatatgcacttgctcctgcaactatcattttaggttttacttcatgtgctatctttctaacttcatcaaaatctataagtccactgtctttatctataccatattcataaaatttataatattgaccagaaatattaactggagcaccatgagttaaatgtccaccttgagataaattcattcccataacaacatcacctggttttaacatagcaaaatatacaccaatatttgcatttgctccagagtgaggttgaacattagcatgttctgctccaaatatttttttgattctatctattgcaagagtttcaacttcatctatgtattcacatccaccataatatcttttgcctgagtaaccttctgcatacttatttgtaagatgacttcccatagtttccattactggaactgatactatgttttcagatgctattaattcaatatttctttgttgtctttttaactctcttttcatactttcataaatctcaggatccgcttttttcaagttctcaaacatattactcctcctagttattatttaaattttatttttacagacatttcataattttcgtttttatcaatatgataatttattattatagtcctttaccaattaatagtcaagtgttttgccatttttccatatttaacatagttactttctttatttttaagttaaaatataataaataatattgtctaattcttttaattggatataatttaaatgtgactattttgaaacaaaaaaaagataatatatttatatagatattaaggaatattacttaaaaatttgatataatttcaatattacgttttttaatttggaggtgtatttatgaatcaaaatgaggaacttgaatataagaaaaatattctaaaactagctctatttgtaggggaactgatgataaaaaatggagctgaaacatctagggttgaagacagtgtccttagaatatgcaggtcaagagggttttatcatgtaaatatttttacaactcctacagtaataattatttcagatgagaaatttgatggcttttcgtttatgaaaacgattcaatcaagaggtataaacttaaacaagatttctttattaaacagtttttctcgagaatttgttagtgacaaagagtatgatattgataatgccattgcacgtctttatgaaatccaagatgtaaaaccttatcctttatggttattttactcttgtacaggaattgcatctgcttgttttgcttgtttgcttggagggaattatgtattaaattttatacttacgtttataatagcaatctttgctgcaattacttatgataaaacgatgaagataagtgcaatatctgcattttcctgtttagtatcttcttttttaattgcactttcaggagttctactagttgaaataggcattttagatgaccctaaaatgcttatagtcggcgctataatgccactactcccaggagttgcttttataaaagctattagagatttaatatcagggaatttaatatcaggaatttctcgtgcttttgatgctgctatgattattattgcaattgcttctggagttggttttgtccttgatacatggtatagaataggaggtcctttctaatgactgatatgtctatgattttgcattttttattttcaggtgttgcaactgctggatttgctgttttctttaatgctccactatatctacttcttccagctggagtaactggcggaattggttggattgtatatgtttatttatttaattttactacaaatgcagtttttgcaggttttattgctgctgctttggtctcagcgtgtagtgagactttagcaagaaaactaaagcaaccagctattgtgttcgtaattccaggtattcttcctctaataccaggaattgggctatataatacaatgttgtctttgattcagaaaaattattctttggctatgtcaaaaggtacagatgcgctatttctaagtgctgcaatagcacttggtgtattagttgtaacttcttttgtaagaacattgaatcttttgaaaatcagaaaaaactttattccttacagaaaatcaaaataaaaatataaaaatagcaatgtacttaaactctacaaatacgtattgagtatttatttaaaaagcacattgctattttttaattataattatcttaaaggtcaattaatattcttgttattactggtataaattctctactgtctctaaattttttgtcattcttctttaagtataaataacagattattgtaagacaaattccaactaatccacttatggcttcaactccagttgtcattccaattgcccccaatatataataagtccctattgttcctacaagaagtgctataagaggtattatataagccattacagctgcttttaatacattcatattatccatactcacttctacatggtcaccaacttttgcaccaattgtgttgtctacttctactaatatttcttttgactctgctgaatttgtagtagcacattttccacaagcagcacaagctgaatgtctttgcatttttaactttgcagttctatcatcaacaatttccataataaatccttgttgattcataactaaccgcctccttattttgtaaatttatttatagtatccataagctcttttatcatctcttcagttttatcagcatcatcatgtttaatgctttctgctacacatccttttatatgattctctaagataattgtgcctactctatttatagcagaccttatagcagatatttgaaccaatatatcaacacaataacgttcttgttccaccatcttttgtatccccttaacttgaccttctattctttttaatctttttatgagagcttccctctcattgtttggtgctaattttctttcttccataaactcacctcatactctaatgatgtcttatacaattatgctctacttaccaacttgtttaaaatataatacggttattattactataaatgccaaaattgatattgcaatagacctactttgattcttagtttgttccatacttaactttccattcatcttaaatcctgccaatgggaataaaaatataaccagtgcatcaattccaagtacaacttgggctgcaatagtccatttactcaaaaagcagaatattccgcccacacctaaaagaacctctaatatatttataaacttatatgtaggtttttttgctatatattcttcaattttttccttacattctgcacgacatggatatatattcatattgtcatcatattttatagctaatttattatttggtgactttatatccctattacagtaaagacattttttcattttatattctcctctagtcttccttaaaaaattttgcctaaattattatacgctctaatactattataccaaatagatacaaaaaacaaaaataaaaggaataattttagctacttcttttacttcaatgtgtagtctataataaatttataataataattaaataatattatttaatctaatttaattattatgtaatctaaaataagtcaaatttgtatgagaggttaaaatgaaacaaatggaattagctattgtaagtttaaaaaaagacgctggagaaatttatgaaaatcaaataaggcaattcttaggtgataatctaaagataaatttatactcatttgaagagggaaatttaaagttttttaaagaaaaacttatactcctatctgcttatttaaaatacgatgaaatagtaaaattatctcactatgatgctcaaatcattgttcccaagttgacatttgaaaagaacagtattgatatgatatccaaattagaaaaagataaaattatttatgtatataacttaagtaaagatatggcaatagaaacaatttctttaatacatagattaggaatagacaatataaatatcctgccctgctatccagagattgagtttactcccacagatgctgtaatcctaactcctggcgaaaaaatcctgcctaagtttaaaaattgtgaagttgtagatttaaaatacagaataatagatttaagttgtattgttgaaattgctacaaaaaccaaattaaaacatctaataaaagatgacctaataaaaaaatacgtagaaaaaataattcctacaagttatagtacaggtgagttattgttagatgcaaataagtttgaaagacaatttgatttgttactatctataattgatgatggaattatatgcacaaataatgatggaataattcaattctataatcatatagctagaaaaattttgtctataaatgcaaatgaaatgattgactcatttgttggtgattgtataaaagacatcaattttcaaaacatattgaccaataaaactccattttttgagaaattgattaaaataaatcatattgatataaatttagagattaaacatatacaattaaatgtatttgatggatttatactaaagatgacaaagttttctcaattagaaaaaaagcaagctaaattaagagcacaactagtaaactctggtaatatcagtaaatacacatttgatgatatattaggttctagtatacaaactattaatacaaaaaaaattgctaataaaatggctcaatcaaattcatctatccttataattggtgaaagtggtactggtaaagaattatttgctcaatccattcatagtgcttctaggagaaaagatggtccctttgtcgcagtaaattgtagtacttttcaagaaaatctactgcaaagtgaattatttggctatgatgaaggggcttttactggtgctaaaaaaggtgggaaaattggtttatttgaattagccaacaatggaactatatttttagacgaaattggagaaatggatttaaattctcaatctaaattacttagagtcatacaagaaaaacaagtacgacgtattggttctaataatgtcattgatattgatgtaagaataattgcagctactaatagaaatttaaaagaacttgtatctaaaaatatgtttagaagagatttatattttaggttgaatgttcttccccttaaaatacatccacttagggaaagagctgctgatatatttgaaatttttggttcattaaaatatgatattccatgtaattttattctaagtgaggaagtaaaagaaatctttaaaatgtatagatgggaaggaaatgtaagagaattaagaaacttaggagaatacttctgttacttgggaaaagatattatagaaatatgtgatttacctgaatatatattggacactatagattcaaattatagtagaaccgtttgtaataaagtaagtgataatataaaaaagtatcaattcaacattggcaaagacaaaaacatcatgaaatacgactataattttaaaaggtcactagatgaatacatatttatattggataatttaaaaaaggcttatgatttaaaagaaagaataggtagaaaaagcttatgtaaaatagctttagaggaaaatagatttttgacagaacaacagattagaaatatgcttttagaactacaagactttgggcttgtagacatacttgttggtcgtggaggttcaattataacatcaaaaggagtagaatttctaaaaaatataaataggtctaacaagttaaacagttaaacctatttaacctatttaattacattttcatatatttaaaaatttattagaaataaccttttccacaaagttttaagtataattaatatttttatcttatctatgctctgaaattacttaatattaaatattaacttgtgaataaatattttttattatcaatattggcacgttgtttgcttaatattattaacataaaattaaaattactggaggtatttacaatgaattataattttaatgagattgttgatagaagcaataatttttcatctaaatggtcagaaatggaaaaaaagtatggaactaatgatttacttcctatgtgggtggctgacatggattttaaggctgcaccttgtataattgattccttaaaaaatagactagaacaagagatttatggctacacaacaagaccagattcttacaatgaatctatagtaaactggctagataggagacataactggaaaataaaaagtgagtggttaatttatagtccaggtgttatcccagctataagtcttttaataaatgaactcacaaaagcaaatgataaaataatgatacaagaaccagtttacagcccttttaatagtgttgtaaaaaataacaatagagaactaattataagcccattacagaaactagaaaatggaaactatataatggattatgaagacattgaaaacaagattaaagatgtaaaattattcatactttgtaatcctcataatccagttggtagagtatggacaaaagatgaattaaaaaaactaggagatatttgtcttaagcataatgtaaaaatcatatctgatgaaatacatagtgacattatattaaaaaaacataagcatattcctatggcatctatttctaaagaatttgaaaaaaatacaattacttgtatggctccaactaaaacttttaatatagctggtcttcaatcatcatatgtaatactacctgatgaaaaagactataaattgttagatgatgcttttaccagaattgatataaagagaaataattgctttagcttagttgcaactgaagcttcatataataatggtgaatcttggctagaatcatttttagaatatttagaatctaatatagattttgctataaaatatataaatgaaaatatgccaaaacttaaagttagaaaaccagaaggtacttatttattatgggtagactttagtgcacttggattaagtgatgaggaactagaaagtgtacttgtacaaaaaggtaaagttgctctaaatcaaggaaacagctttggcattggaggaagtgggtatcaaagaataaacttagcttgtccaagaagtatgcttgaagaagctcttataagaataaaaaatgcaattaaataaaaatatttaaggagaatttgcactatgaaaatgaatacagaaagaaaaataccttcatttagatattccttgttagtaatgcttgcaataatagctctaacatcagttggtatagttgtatttaatgcttctataactacaatgtttttactttcatggcttatagtagttcctgcagccacgaaacttggttatactaatgatgaaatagaagcttttggatttgaagttggtaaagatgcctttcaatcaaacttaattatactttctgttggtgtactaatagcagcttggatagctgctggtacaataccaacagtagtatatagtggactaacaataataacccctaaatattttctgcttacaacattaatcgtatgttcattaacttctgttgctactggtacatcttgggggactcttggaacttctggtatagcaatgatgagtattggtactagtatgggtattcctcttggtttaacagctggtgcagtcatttctggtgctttctttggagataagatgtcacctctatcagattctacaaacttagctgcagcagtttgtaagacagatgtaattacacatatgaagcatatgttttataccacaggacctgcatacgtaatatgtatagttctgtatacagtaattggatttaagtattcaaataatactatagactatgttcaaataaatcaaatcaaggatgtattaaattcaaactttcatattggtttagtagcaatgattccaataatatttttattattacttttattgctacaaaagccacccattatatctatactaagttcagctatcatgggacttattatagcagtatttcaagaaggagaaaaaataggtgatattttaaattacatgctatcaggatttactatagatactggatttgtctatgccgacaaactattaaatcgtggtggaataatgagtatggctgaaaccgttttactagtatttgtagttttcgttattgccggtattctccaaaaaactggattcttagaagtactgcttcaacctcttataactaaaataggaaaatcaagaactaaattggttgggtctacttttatagtaagctactttgcaaatgcatttagttcatcaatgatgtttacttctgtatttgtcggaactctaatgtctccaatatacaaagagtttaaattaaaaccacaaaatctatctagaattatagaagatacagctacacttggtggtccattaataccatggaattcaaatgctgttttctgtgctcagactcttggtgtaagcccactagaatttattccatattgtttcttaagttggattacacctataatttcatttatttatggtgtaactggttttactatgcttacatacacagatgatgaaattgaagagttagaaatatttgatactgctcagagaagagttgattgaatatgaaatttgaatactattacttaattcaggatattgcaggtatattattggcatttataggacttagaatgtctattattggatttaggatactttctatgaaggggatttctataaatacacttttaattgtaattaaatactgcttatttaccatagcaggactgaatttattaatatctaagtttggaattagacactggatttggagtgtttgtatgttgataatatccataataataaatcccaggattaaggtatcaaaatagaaatagttattagacttaaatttttataaaaaaactgctttacaaattaaagcagttttttattgttacttataattaaataactggtgtatcagataagtaatcattacttacataaccatatccaccattatactttatttttacccatccagtagcaaatatttctattgtttctactttgcttccatatgaaaggtgacctattttttcatcttctgtacttggtcctttcctaacatttagaccatctttttcttttacatactttatttttatattttcattactattatcaggcttattatttgtcaaataagacccactaacatatccaataccttcattgtattttatttttacccatccagtttttaacacatctaaaacttctacttcatcaccattatttagatatcctataacagaagcttctattgtagcatcatttcttatatttaccttatctgtattagttacatacattactctcttattgttactatttgcctgtaaatcttttaattctttaaatgcattttcatttcctccactaccaacttgagttatagaggtagcatttttattcaaaaatacactcttttgtgttgcacttaattgttctcctacgattagtacaggagaattttcttttgatgccagtactcctactgctagagcgtctataagttgattttgatttttcattccatccttagccacaaatacattgtttaatttattagatgtataaaacttttctattactttaccattagtttcatttctatctgctccacctattctttctgaattaggtaaactttgttttattttatctgatacagcattagtagagcctattatgtatgatttatttatattcttagattctataaaatctttaaagctagatataccagatgcatcagatactggaagtataaccattccattagtagcagctacagaagctatactaactgcatctgcaagacctgtgtacccatttactacagctatttctgatatatcttttaatccttctatttttttagctatactcaaagctgtttggtatctatcactaccaccaactctatcagtagttaaattattagattctaactgtttttgcacatcatttgatacagaactagatagaccaattatataaacttttttaactcctaatctttttaattctttctcagtttgtgaatttagattatttttttctgtcaataatataggagcattttttaatttagcaaatggtgttacagctaatgcatctacaatagattcactatttacaactacagcctcattcgcactactccatccttttttgcttacttcaacagcagtttggtatctgtcctgacctactaaagtattctccactgttgttctacttatttcatttgcatatgctactggtgataagcttaaaactagagctaagcatagcattgatgatattgatttagttaatttcatcttgactccccctaaaattatagtatctaaatgtttcctatttaaaatagtataacataataatttaagtaacatcattattataaaatattatttttctatctaataagcttttattcttacttgacattaatactttactcatcaaatgaattttttatataactaaagtttgtaacaacatttccttagttaatcatttaaagctactttttttaattagattatgtacaaaatataaataacaatttaaataactttttaatatattgtagttgattatataaactttatattataatgtataatgtggagttgattataaaattgatataactcaagtcatattaaaagaggtgtattttatactatggatttattgcatcttaagtattttcaaactgttgctagaatggagcacataacaaaagcatcacacaagttaaatatagcacagccagctttaagcaaaactatatcttccttagaaaaagaacttggagttcagttatttgacagaaaaggaagatatattgttttaaatgagtatggaagattgtttctaaaaagagtagatagcattttagatttagtagaaagttcaaaaaaggagttacaagacacttctttagaaaattcaggagaagtaaagatattatctcctgcagcggctaatgtgttaccatcacttttgagtaatttcagaaaactatatcccaatattacttttaatgtgtcacatactttgccatcatcttataaaaaaagtgattttgatttgtacatatcttcttcatttacaaagctaaactcagaaaatagcataactttaacatgcgaagaaatactattaggagtttcaataaaccatcctttatcattaaaggatgaagtatatctaagcgaagtttcagatgaaaactttatagttataacgaagggtgagaattatagagaggtaattgatatcctgtgcgaatcagctaatttcaaacccaaaatagcatttgagtctgattcaccatatacaatttatgctcttataaaatcacttcaaggagttggatttatatgtggaaaatcatggggattatctcaagaccctgagattaagttgttacatatcaaagatattgaatttaaaagatatttaaatctttcatggtttagcgaaaactatgaatctaaagctgtgttgttgttcaaaaactttcttatcaactattttaaaaatatttaaatcaaagttgataatattaaagaggatatatcaaaatataataaatttaatcttaatattgatacatcctctttttatcattttatattgaacttgtattatagtatagaattatatgttatagctactttttctgtctttcaaatagggtatatcttccctatacttttttatttcatctaaatcaatctctgataatacatatttttccctgtatgtatctaattgagttattacagtacctctaggattgcatattttactctttccaaatagtattaaattagagtcattacttactaaatttacacctactgtatatacagtgttctctaaagctctttgagatacatttaaatcccacatatcttcatcttgtattctccatgcagatggtataaatattatttcagaaccttttaatgtcaattctctggatacttctggaaaacctgcatcataacatatcattacaccaaatctaccaaaatcagcatcatatacctctactttttcccctcctttaaagtatactgcttctaatgaccacagatgatttttacagtattctcccataatcttaccttttctatcaaatataactgctgaattataaacatgtgtagaccctttttctaaggttccatatggagatatcaggtatacattatttcttttagcagcttctgacattgattcctctatgtacttattatgttctcttattaattctaatgttttaactccacctaaagactctaaattatatcctgtagcaaatagttctggtaaacaaattatatctgccccatgttttcctaagtcatctatcatctctactgctttttctatattttttttaacatctccaagtacactgtgttgttgaattatacctattttcaccttacgacccatgtaattgccccctttatttatctttgattccaaaacatttcattaatatataataaataaccatactcactacaattccatttatcggaggtattaagaaatttatttttgaactataatacgacgctgcaaaacctattaaccagcttattactgcaatccaatttattccttctctatgcttataagttcttccttgtataaaataatactcacaccacataattcctgctattgcaggaactgcgattcccaagaaagataaaaatgactgaaatttaaatattataccagtagctgctattattgtacctattagacctgcaactaaagtcaaaacatttctttttacatttggaaaaatagtttttaatgctaatccaccagaataagcatttgatacgtttgttgaccaagatgcaagtattaaaataacaaacgctacccatccaaaacctaaattagccaatacttctgttatatcccaagtaggtgctcccatagacattacaccagctgcaacttgttggaataatgaaataatccctagacctaaaaaactgataatccaaatatcttttactcgtctcgtatatcttaactggtcaggtgatataattgcaccaactataacaagacctactacaatattaagaccttcaaccatactcatagttgtttgaggagtataattataaatagcttcaactccataagtagaaaaagctttaaaaactccccacaccattaatatcataagtggtggtataactaagtaattaaatttagccatagctttaaagccatacagtgcaaaaacaaccataaataatccaagtataactgtaactaatgttaggtttacacttgggaatatcttttgtactgatagtcctgcaacccctgcttgtacaccaaaccatccaaaactagttataccaagtaatagagatataagatactttcctcctatctctccaaatgcccccttagctaatacatacgtatttaacccttctttgtaacctatataaccttgtatcataatgattgcaactaatattaagttccctataattgatgtaataatcatattagaaagagtcattcctaaaattaaagttcctccaaccattagttcagatatagctatgttagaaccaagcatattaaacaatggagctaaccatccaactctttcctcttttggaactggatttaaaactaattcttctctctcttgcaatattatccctccctttctttataaaagaataatttctacttttttctacttttttttcactattaatagaatttttctttatataattgtaattctattctacaaaaaagtataatatctagtttgttatcaatttgatataatttaagttataaatagataaatagtccaaatttattattttaatttaatctattaagtcatatattagacttatttcaaatttgttatatattctttaattaaaatcgtgtactcattacagaagtaatttctaaaacaatcaagtttatgtaaaatttttaaacatagtattttaattatattggctgagaatacaaggataatttatgaaaatatatagagaaaaaatataaaataattctaataaaaaaagtctgaatataaatatactttatatccagactttttacattttagtttcttgcaactacatattattcattatcttttatatcaacttttatacttaattcttctaattgctcatcttccgccaatgtaggagcatttgtcatagggcaaacagcattttgatttttagggaatgcaataacttctcttatattatcagttcctgcaagtaacataacaagtctatcaagaccaaaagctagaccagcatgaggaggagtaccatatttaaatgcttctaataaataaccaaacttttcattagctctttcctctgtgaaaccaagtgctttaaacattcttgattgaatatcagaatttgatattctaacacttcctccacctatttcataaccattcaatacaatatcataagctttcgctcttaaagatgacttatcaccttcttctaacttgtctaaatcttcatccataggtgatgtaaatgggtgatgcattgctgaaaatgtgcctgtttcttcatcttcttcaaaaactgggaactcagttacccatagtaagttatatacatttttatccaatagattaagcctatttgctacttcaagtctaacttgtcctaaagcatcaaatactattgagtttttatcagctacaaataaaagtaaatctcctacttcagcattcatttttgtaagtatagcgttcatttcttcttcattaaagaattttgctattggagaagttactccttcttgtcctactttcatccaagcaagaccttttgctctatatgtcttagcatgttcttctagtgatgatatttgttttctagtaaagtcgtcagctttgccttttacgtttatacctctaacactttttcctggttgtgtagcatcagcaaacactttaaatccacagttacaaacaacatcagatatatctgttaactcatatccaaatctagtatctggtttatctgaaccatatttagacatagcttctgcataagtcatcttaggaagtggaagtgccaattctacatctaaaacttctttaaatatcgcttcaagcaaaccttcaatcatactcataacatcttcttgctcgacaaaagacatttcacagtctatttgtgtaaactctggttgtctatctgctcttaaatcttcatctctaaagcatttaactatttggaaatacctatccataccacttaccatcaataattgtttatataattgtggtgattgtggtaatgcgtaaaattttcctggattaactctacttggtactagataatctcttgctccttctggtgttggagctattaaaaatggtgtttctatttcgcaaaatctattgtttgataagtaatttcttgtaatattcattactttatgtcttaattttaaatttctttgcatagatggttttcttaaatctaagtatctatattttaatcttagtgcttcagaaacatcatcatcatcttttatataaataggcggagtttctgacttgtttaaaagtctaagttcagttgcaaatatttctatatcaccagttggcatattagggtttttagattgtctttcgcatacttttccttttacagctattacaaattcagcccctaatttttcagctttttcaaaagcttctttatctacatctgtatcaaaaactatttgacataatccacttgtatctcttaaatcaacaaatacaagaccacctaaatttctttttttctgtacccatcccataagtacgacttcttcatttatgtttttttctctcaactctccacagtagtgagttctctttaaaccctttaaagtttccaagatactacctccattttatttaattttaatgctatatatttatctaatacacaaaacatcatactttcttattttacagcttttgctttaattcttcaactaatgtacttaattttacagtagtttgctctgatgttttcatattttttaatgtcgcagtgtcatttttaagctcatcatctccaatcactattgtaaattttgaatttattttatctgaatatttaaattgtgctttaacacttctctctatatggtctttatctgcacttatatgattttgtctcaagtcttttaataatttaaagcttcttgtatttgcttcttcacctatagttactataaatatatccgtagattgagggttttctatttcaattccattaccttcaagtgtaagtaaaagtctttcaattcctagtccaaacccaattccacttataccttttggtcctcctaattgttcaacaagaccatcatatcttcctccaccacatacagtactttgagctcctatatcattagatataatttcaaaagcagtttttctatagtaatctaagcctctaactattgttttatcaattacaaagtttatattcatttcctttaagtattcttgaagtttatcaaagtgagatttacaatcatcacacaaatggtctgcaataaatggtatatctttgatattttctttacatgtaggatttttacagtctataaccctcattggatttttttctcttctctcattgcaagtatcacacaatatatcagcttttgagtcaagatactcttttaataaagcattgtactcttttctacaaactggacagccaactgaatttatactcactaccaaatcatttaatccaacttcattaaaaaattgaacagctagtgcgattatttcagcatccattgaaggagtatcacttccaagtgcttctattccaaattggtgaaattgtctttgtctaccagcttgtggtctttcatatctaaaacaaggtgtcacataaaataattttgttggttgagtatctgcatataatttattttctataaatgctcttactacacctgctgtaccttctggctttaaggtaatttctctatcacctttatctttaaaagaatacatttctttttgaactatatctgtagtatctccaacacttctcttgaaaagttctgtatgttcaaatataggtgttaccatttcttcatatccatataaagcacatatttctctaaatttattttctacataacgccatttgtaagcctcttttggagttatgtctttagttcctctaggagctttagtcaacatttttatatacctcttctttcttcctttttatcatttcatctactctttcaatgtattgttcaacattttttacattttctactctttcaattctatcttcatctacataaacaaatttcgatatagcacctgcacctaatgcatagttactttgtttttcttccataatctgtatattataaatgcactcatatccttctttagcataacctatattttctaaatttcccaacatatgtttttgtctgtacatataatatggatttaatcccatatcttttgcatatttcattgataaatctatcatttttaccatttcttcatattgtgttagatgttctttatacctatccatatttatatttaagttggatgctctctttatggctaatgtatgaactgtaaggctttcaggagaaagtttttttatctcctccaatgtgttctttaccatatttaattcttcatctataagacctaaaattatatccatatttatattatcaaatcccattctacgagccatattaaagcaatctactaaatcagatactctatgctctcttccaatctttaccaaggtatcatcattcatagtttgaggatttatactaattctactaacattgtgtttttttaacactcttagtttttgttctgtaatagtgtcaggtctacctgcttctacagtaaattctttaattttacttaaatctaattcattgaacaatgaatttataagcaaatctaattcttcctcatcaagtgtagttggagttccaccaccaatatatagagtttcaacttctttcttagtctccttaataactttggcaaaccccttaatttcttcaatcaatttataaacatattctctttttaaatgtccaaattgttttaatgaatttgaaggaaatgaacaatatacacatctagttggacaaaatggaatacttacataaagagaaattttatttttatctataggatacataaataatcgctctcttttagctatttcaagagctaaatctattttcttatctattataaaataattatcttttagaatggttcttatgctattatcatctagctttttatccattaaattgtggacaattttgactggtctaataccagtcaaaattccccatggtacataagaattaaatacttgtttaagcactacaaacatgctttttttgatattttctttacacagctttttaaagttcctcttactttcactatctagtctattaagaaattcttcaatcgttttgctactatcaaatccatctaaaaattcaagattcatattttctatattctgtattgactcgtactttaaatttccattttcatagtattcagtacttgagaataatacaccattctcataaatcaatctatttattaaatgctttgactctatattattgttagcattagagtctttaaacttaaattcactggtaaacaattttataagttctgctacttcatacttataatcatgtccttttaaaaaaacatacaacatcaacttaactccttctatttaacagtagaagaaccccctcactaatatagttattaaatattttatacttttttaaatactaatataaaattacatgtaaggatttgtcttcttttcaacccctagagtactggttggtccatgtccaggatatactctaacagcatcttcatatttgcataatttcttaagtgatttttccatttggttaaagtctccactatataaatcagttctaccaatacttccagcaaacaaagtatctcctgtgaacatttcatcttcaactcttatacacatacatccttgagtatgtcctggagtatgcaagaaagtcatttttaattcaccaagttcaagcttgtctttatcactcacatagatatctgcatcaaactcttgcgctccacatctcattgtataacttagatttttatttttatcatttaataattctttttcatcaacatgtgcaactactttagcaccagttttttctttaatatccttaacatatcctatatggtctccatgcccatgagtaaggataatatattcaatatttaattcattttcttttacaaaacttaatgtctctactaaacttccacctgggtctataactgcacattttttagtcttttcatcacctaatacataagtatttactccaaaataactatctacaaatttttttataatcattaaagttttcccccttaaaaagatttacttgagtctaatagtattgttactggaccatcattagttaactctaccatcatatgagctgcaaattgacctgtaccaactgtcacacctttatcttttgctttttttacaaattcttcataaaggttatttgcaagttctggtctagatgcattactaaatccaggtcttcttccttttctgcaatctccatataaagtaaattgagatactactaaaagctctccacctatatccattagagataaattcatcttgtcattttcatcttcaaaaattctcagattcaatattttatcaatcatataatctacatcacttgatttatcatcatgagtcactcctaacaatactagtaaccccttatttatttgacctatagtgttttcatctactgtaactttagatgaagatactctttgcactactgctctcatagtttcctccctattattttaactctaatttgtcattctataaatactttctacaccaggaattgcttttaattttttcattagaatttttaattcctctgtgtcattaacctctacaagtaagtttatacttacaatactatccttaccttttcttgcatttattccgtttaaactaagtttatccattgcaacaatatgagttatttcattaacaattcctcttctgtcaatagcttttatttgaatttccgcttcaaacttaccttttcctgctgaactccatgaaacctccaccaatctattttggaagaaatcaccattattgtttgcatttgggcaatcagctctgtgtatggctactcccctacccttagtaatatatcctacaatttcatctcctggaagaggattacaacacttagcaaatcttactaagatattgtcaagcccttttactataattccttgtgatgcgtttttctttctctttttactgtattctgtttcacttatattgtgtttatttaaatcttcttcttgtatctgttgttcctttttagcttttttaacctcttttaaatataggtcttttaccttagataccacttgagatgacattataccgccataacctacagtggcaattaagtcctcaacacttggctgattaaatttcttagcaactaatgccatatatttttcaacaagagggtctttttgtggtatatcatgcttcttaaattctctttctaatattgtatttccacggtcaacattttcttctcttctttccttcttgaaaaattgtctaattctactttttgcatttggggtcttcactatattaagccaatccctacttggtccattagaattagatgatgtaagtacctcgacaatattaccattttgaagcttataatcaataggaactattcttccatcaattttagctcctacacatttattacctacatttgtatgaactctataggcaaaatctataggtgttgattctgctggtaattcaattacgtctccttttggcgtaaatacataaacttgactattaaatacatcttctttaagtgcatccataaactcttgtgggtcttttaaatctttttcccactccatcatctgtctcaaccattgaagtttttcttcaacctttgactctttgctagagataccttctttatatttccaatgggctgctataccattttcagctatattatgcatctcatgagttcttatttgtatctctaaaggttctccatcaggacctacaacagtggtgtgtaatgattgatacatattgggttttggcattgctatataatctttaaatcttcctggaataggtctccataatgtatgaactataccaagtactgcatagcaatcctttacattatcaaccaatatccttactgctgttaaatcaaaaatctcttcaaaagtcttatgttttttttgcatctttctatatatactgtaaaaatgctttggtctaccatatacatcacatggtatacttaaatctttaaacttatctttaagaagttcaacaattccttgaatataatcctctctttgacttctcttcattgatactctactaactaaatcataatacccttctgggtccataaatcttaatgctctgtcttctagttcccactttatcttggaaattcctaatctatgagctataccaccataaatttcaagtgtctcttttgctttatactttgctttttctggaggcatgtattttaatgttctcatgttgtgcaatctatcagcaagttttataagtataacccttatatccttcgccattgccaaaaacatttttcttaaattttcagattgagtttcttctttcgaacgatattttatttgaccaagtttagttactccatcaaccaaatccgctacttctttgccaaattctttttttatgtcttcataggtatattctgtatcttctacaacatcatgaagtaaacctgctgttatagtttcaatatctaattccatctctattaaaatatttgcaactgctaatggatgaataaagtatggttccccagattttctatattgtccttcatgcgctttttttgcaagattataggctttttcaaccatttcaaaatttgcattaggtgcataaacttttattttttcaattatttcttgtaattctttatcatgcatataaccacctattttgtataaaattttaatatatatgaaaatagttggtgttataccaactattataaaagtactagtattttataagagaattaacatcatagttagacaacttttctctcccatttaagaattttagctcaatcaaaaattgcatagaaactacttctccacctaatttttctacaagcttggcagcggcttccatagtcccaccagtagccaataaatcatctactattgctactttttgaccctttttaattgcatccttatgtatctctaaagtatctgtaccatactctaatccatactcataactctcaacttcacctggtaactttccaggttttctaattggaacaaatcctactcctaaagcatatgctacaggtgtacccatcaaaaatcctcttgcttctggccctattactaaatctacatctttatctttcaattcttcaactatagaatccactgcatatttaaatgcatctccatctttaaatagagttgtcacatctttaaaatctatgcctggttttgggaaatcatcaatattccttataaagttttttaaatccatgggaaacgcctcctaataactgctattgtattgtttttctaaattttttagattattgagtattaaactctcatttaagtctaattttttctgtggttttggcaatattcttatgagtacagaatttttttcataatttaaattaaagtcaagtaaatttaattctctaaatacatttaatatcgtaaaaaactttaatggaattacattaaaagtttcccttatatttaccatatccaaatcaatttctttttttataagtgcttgtttataaattgttataaattcatctcttgatggaactatattactaactacattctttaaatataataggtctgttttattataatattttataatttcactttcttctcttttattctcatatatatacgaatattcgcctttattgtataaataatcataaagaataatattattatatctttttaagtctattttatcaatattaggagaaaatataagctctaatttatcagtatttttgctaacatcttcaataatattgtaatttatgttaaaatccaaatctataagtgatatatctgacattgctctataaaatccatttatagaattagatattattagtgtatctttttcaaaataatcaaatatatttatatctgtatttccatcaaataattcaaaatcagacacagatatattatacaggctttgagtatcttttggtattatttttgacattaatttcaatgaaagtttgtcattacttgcacttttaggtcgagccaatcgtatatctttaagtaaaaattgtactttcctatttcccatatagttattttcatctaattggaatagtacatctactttgtctcctactttatacattgattttaaatgactcatattaaatcctatacattcatagcttttctctttttctatacttaatttcagatgttgttgattcttacctataactttcaaatcttttaaaatataatttctaactataaatctaggattaggattatttaatccaaagggttctaacttatgtaattcttctacaagatttaaatttattacattttcttgtaattcaaactcgacatttacattctctatcatatcatcttcagttaaattataatctgcaaatttatttatttcatttgctaaaatttctacattgtctgaatccaaggataaccctgctgcttgttcatgaccaccaaacttagtcatcaagtctttgcactttatgagagcttcaaatatattaaatccttttattgacctcgctgaaccagtagcctccccattttctatacctagaagaattgttggtttgtagtatttttcagttaactttgatgctacaattcctattattccatgttgccaaccctctttggctaaaaccaacactttgtcatcattgtatctgctattagactttagcatttcttcagcttcatgatacatcttagcttctatcatctgtctttcattatttttttcttccaatatactagctatttctactgcctcttcttgtgactgagtagtaaatagctctactcctaagtaagaatatcccaatcgacctgaagcatttatcctaggacctattgcaaaacctatatgagaagaacctatcttatcactttctacaccacaaacttttataagctcccttaatccaatatttttgccttctttcattgattttaaaccattttttacaattattctattttcatctataagtggaacaatatcacaaatagttgctagtgttactatttccaaataattatacatactagttttaaattcttcttttggagtcaaggcttgaatcattttaaatgctacaccacatccacatagtgaatcaaatggataattacaatcttcttgttttggatttattactgcaaaggctgatggaatttcactttgacattcatgatggtctgtaattataacatctatgcccaaatcattcgctgtattgacctcagacactgatgtaattccacagtcaacacttataatcaagtcacatcccctagagcttataagcttaatagcatcctcatttataccatacccttcttctaatctattaggaatatagtaatcaacattgtaacctatactcttaaaatataaacacaagatggatgtagatgatacaccatcaacatcataatctccgtaaatccaaattttttcgttcttctcaactgctaactttattctatcaacagctttttgcatatctttcattaaaaaagggtctcttaaataatctaaagatggattcataaatatttctgaatctttttcagtacatatccctctattttttaaaatttggcagatttccggggaaatattaagttttttgctaaattcactttcctctatcttacctttatacttcaatatccattttttcaaatttaattccccctaatcttttttgtattttgacctaatacttcttataactaagcaaaggcctattataaaggatataaagaaacccgctattgcagtaaattttatccatatattattttctatatttggagatgcaattataagagaagaacctactataatagatgccaacactaaactcaaagatatttgagatgttagctctattatacaattttctaacctcgtcattttaacatcttcaatttgcatttttatattatttctttctatattttttaaaattgcttttaattgctttggaatagtttttatgtccagtaatatttcttctacattttgtcttgaacttaaaacaacatttttagggttaaatttactcttataatgatgtttcataaactcttttcccatagaaccaaaagaaaaatctgtgtttaaagttctacttgttccttctaatgttataactgtctttgcaagagttacaaattgtgcaggcatgactattttatactgtctaaaaaacctaaatagttcatttaatatatctgttacatttattttttctatagaaatatcatagtaataatgtattagataaagtaaatcctgtctaagtcccttaatatcagcctctccatttaatgcatccatttctatcaatagatatattatcttgtcaacattcttttctacacctgctaatgcaatttcatttaattggtttaaagttttattatcaataattccaatcattccaaaatctatatatgctatcttatttttagcaactacaaatatattacctggatgtgggtctgcatgaaaaaatccatgagataatacctgtgtaaaaaatgacctaactcctatttcaacaatagtttttgtgttataacctagtctccttattttttctacatcacttaactttgtaccattaactttctccattactaaaattttcttagtattatattctgagtatactttaggtatatatacttcatcactatttttaaatatcctagagaatttagttgcatttatggcttcaaatgtataatcaagttccctcattaattgagtttgaaattcttcaatcatctgtactaaatctaaattaaaatccttttttaaatcttttaaagtatttgcaatagttctaagaatctctaaatcagattttattattttctctatatttggtctttgaatttttacgattacttcttctcccgttttaagtacaccttcataaacttgaccaattgaagctgctgctattggttcttctttaaattctaagaatatttcttctatacttaaacccacttcttctttaaatatatcaatagctatatttgaatcaaatttctctacatcatctctgagttttgatatttcatcaattatatcctggtctaacaagtcttttcttgtactcaatatctgtcctatttttatatatgtaggtcctagttcttctaaaactcttttcattctctcaccagttgtcatattttttatttcttctggtgggtcaaatagtggtattttataggcaattccttctatatttagtctttctacaataaaactaaaaccatactttattaaaacatatccaatttctctatatcgctttaaatttctataacttattctcaaatcttttcactcctaagataggtatacccaaaaacttacaccttaatttatcgtatatgacattatttcaccaattgatattctaatatcctatatcctctttaatatttaattttatcacatatactaccaattttattaaaattatttaactcagttaatttttatttttgacattttatatctggtttaatcaaatactttttgaaaactaaaatatcaacaaaatctaataaaataaattagtggttgcctcaaaacagatttaaatatgttttgaaacaaccactctttaaactaatatttttgattttgtgctgcctctaaataccattcataagattcatcaatatattttttatcttcttctgtaagctctctaacaaccttaccaggagaacccattatcaaaacacctggtggaaacttcttattagatgtaattagtgtacctgctcctatcagagtatattctcctatttcagcattatccaatattattgaacccataccaattaacacattatcactaattttacaaccatgaactatagacctatgcccaactgttacattgttaccaattatagtttctgtatctccatgcactatagaacaatcttgtatattagtgttttctccaatagttattggtccttcatcacccctaactactgcattgtaccatatacttgaatctttgcctattttaacatttccaattacatctgctgattttgccacaaatacactttcgtcaattaaaggtttatcttctaaataatctctaatcatatataaacaactcctttaaaatataaatttagttggttgctccttctaacattaacttagcttgtatcattatagagcactctgtacgttttctttgcatttcacatcctaattcatatggttttgatatgtcattattaaagtttatcgcatttgcatgacatccacctgaacagtaaaacttattccaacattgtttacactcttctttagtatatacatgagcttctctaaacatattttttaaattttctggaagtactatttcttcatcaaatatatttgccattttaaattcttcatttccaacaaattgatgacatggatagatatctccatttggagttacagaaagatactcatttccagctccacatccagttattctctttattacacatggaccttgatttaggtctatcataaaatggaaaaatttaaatccatctccttgtaattgtctatctgcatactctacagcaaatttttcgtactcttcaaatatcttaggtaaatcttcttctctaagtgcatatggattactctcatctccaacgactggctctacagaggttaatttaaatcctaaatctgcaaaatgcataacatcttttgaaaaatctaaattatctcttgtaaaagtacctcttatataataatacttatcttttgctcttttttccacaagtttcttaaatcgtggtaatgtaatatcataacttcctttatcatttaaagttggtctcatattatcattaacttcttttcttccatctaaacttaaaactacattatgcatattttcatttatataatctataatctcatcatttaacagtacaccatttgtagttattgtaaatcttatatttttattataatctttttctacacttcttccatagtcaaccagttgttttacaacttcaaagttcatcaaaggctctccaccaaagaaatctatctctaggttctttctacttcctgaattagcaatcaaatagtcaattgctgccttaccaacttcaaaactcataagttctttttctcctccaaaatcaccttgagctgcaaaacagtatttacattttaagttacaatcatgagctacatttaaacataaagcttttactacaggctctctatgtacaaagcttggatgatattgatatgtatcttctgtgtataaaagaccttctttttccaaatttaatatttcttcatatgcttcatttattttttcttcttgatattttgattttaatatctctaatatttcttctttacttttttctttataaaaatctaacaaatcgtatgcaacatcatctaacacatgaacagctccaccattcacatctaaaacgatattatatccattcatagaaaatttatgtatcatactcataccctacctcctaaattactatctatactaaagttttttattattttaattaaactttacccttcattatatcataagtttacataaaatacatacaatacaaaaatgacttactctccgtaagtcatttcattaaatacactatatccccctaaattggcgcactaatatattaccaaataggtattaggctcctataaaataaataaaataaattttgtatctgattttatattgttttaatcttattaaaatataataatttcttttttcctgataattttgtataaataagtgcttgtatttaatttgtcttctttagattgctgatttctttgggtactttaggctgatgaataatccaaggacaggtactattagctgacaaaatagcagtgctaagtgccaatgagctagcaaacttcataaatcttacaataaactttttcataacttaactctccctcatacatattttacttatactttagcttttaacttacctaatactaacatcacaaaaatccaaaacatggcaaatgcgctatatgtgaaataatctacaaatatactcaaagaaagacttaaaattgttatcaataacactactgtagatataaatatagcagttttcttataaacaaacttttccctatcacttatagggttactcctatgttctattggacacagaacacaaattccaacccaactaacacttgcaataatcataataatatttttaaataagtctatatttatattttctataattaagattgtagataaaattataaaaataaaggttaataagcatctaaaataattgtctgcatgataccctcctgaaaattgtcttattggacaataacacattaaaaaaaataatacatatgtaaatttaccaaataaaaaacctataaacagcatggtggttatattaactatgaaagctattaatatttcaaatccataagaatagactttagattcattattatctatcatattattacaaattaaaacagatgtcattttttcagcatatcttttaaacatttttacctccaaaaaaattttacatatatagagtacattcttttttgagaaaattcaatatactttacaaaactagttgttaaaaatgcaaaactggtcaaaaaaagacctatataattttcttattattatttatataacaaaacaattataataaaacaattttatcaagctttatatgcataaaaagcctatgtcaaaatagaaataaaccttttccccattgttaaaaggctaaaaatatattttatttcatataaaaagagtacctcacaaactaaaaagttcattttgagatacccattttatttattacaaaatatcaaattttatttatttgcatatattttctatatattttagccttttaactttgtttttgttttacatactgtagtgcttttctattctgttttactgcttcaagacaaactttttctgtttgattatcaacaaattctaaagctctataattttgctttactgcttctaaacatattttttctgtttgattatttacatatttcaacattctataatcttgttttactgcttttagacaaacttcttctgtttgttctttcacatatttaagcgcttcataactttgattaactgcttctaaacaaatctcttctgtttgttcctttacataagctaaagcattatagttttctcttactgcctctaaacatattaattctgtctgattttctacatatttaagaatttttccattttgctttactgcttctacaaatattctttctgttggtatctttacataacttaatatttcttttatttcaagttcttcaaatgaacctcttactgcttctatacatatattttcagtctgtttttttacatattgcaatacttttccattttgtctaactgactccaagcaaatttcttctgtttgctcttttacgtactgtaatgctcttccatcaattcttactgcttccaaacaaatctcttctgtttgcttatttacatactgtagagccatataacttctttttactgcttccatacatattttttctgtctgttcatttacataatacaatgcaaagtcattctgttttactgcttctatacatatttcttctgtttgctcttttacacaagatagtgcactgtagttttcttttacagcttctaaacatatactattactttgttcctttacataagctaaagattttccatctttttttacagcttctaaacatatggctggagtttgctcttttattccttttaatatctctgcaacatcatttttagatgccctttctataaatgctagacatacatcttctgtttgatcttccacaaatttaaatacttccatgacatcataagttgatgcattttttatagcctcaattagtacattttctgtcttattatttatgtagtacaaagctctgtagttctgttttactgcttctatacaaatatcctcattttgatttgttatatacttaagagctttatatgtctgttttactgcttccatacatactttataagtcttgtcctttacaaactcaattatagtaccatcctgctttactgctagcagacacatctcttctgtttggttttctatgtcttttaactctctgtaatcatattttactctgcttaaatcatttaaatgtactttgttatcttcctttaaatcttcttcattattttctatatcatactcaaattcttcatcatctaaatagtcatttttttctggtaaaaatatagatttaattttattctttatatccataaaattatcctcctttaatatgattctatcattaaagtaaatcgtttttaagcacttatttaattaattttatattaagtttatttaaaagtctattcattgtcgatagattatattttatattaataattttatcttatatatgtggggtaataaagttaatagtggacattttccatcccattagtatacactatttatatttattactcatttatagtgatttttttcaaattttttcttatttactatatcatatttatccaatttatgatattatttaaatataatataagttttataaagtatattaaatatattataagatggaggtcgagtaattttgaaaggaaacatagtacaatataattttgcagatatagaggaagaagtatattcgttggattatgctatagcatggaatacagatgaggaaaacgtaaacataataccatttacaaataaattctgtaaagaatctatagaatctttttgcctaggtaaaattaataactttgttgaaatattaaatgaaggttttgttgaaaatcatcattatgtacatttagataaaatgattagtgttcctaagaaaaaggttaatttagtatatcaacaagacacacatggttatcttctaagagatgataatgacaaccttattcctgcaaaaataacttcagagcaatctaaatctatatcaagtaagatggagttattctgtgctggtgaagaaaaatgtttaattaatatattactaaaggctgacccatcatatattttagatgtagatagtataaaagacaaaaacattctaaatctaggttatgagtctattgacagatataaagaatacaattttgatgatgataagattttaatattttttataaataaaaaacgttattcagtgattatgaaaaaaacaaacaactctgataacgatttagtttccagaaacaatgctattaaagaattatttactaataaagcaggaaatcttaactaatattataattttaaattatattattaattaaattaataatagtatacaaagaggctgtctcaaaatagagataagcttctttttcattgttgaaataataaaatatatttaattctatataaaagagagtgcctcataaactaaaaagttcattttgagacaccctcctatttataataaacaaataaatccttaaacctatcgagtgattataatttttagattgggttatcttgcatttttaaatttaaggtaactttctactctaaactttaatctctaatcaatatcatcaactgtaacaacttacaattaaatctttaataatcaaactttagactatctatattaaaactcaaattagatttaggatttatttggatatcacatttattttattaactagtaatcaattatttttacttataaacttattcttccctaattctattattaaatacttttaattatttttcaataccatatttttttaatttttactattaaatcacaaaatattatcttactccatcacaactacttttgatatcatttgagaatgaatcttcattttaatagtacttttattgataataacatccatatatactatagtcacaatgcagttttgctttttcacaaaatgactattacaaagattaagtaattcttagtaatcttttataaaaaagagatgcttcaaatttttattttgaaacatctcctttttaattcgtaaaatataattttgttatttagaaaaatgaattttagtaactatataacattaattatatattaaaagtcttttctatatagctttttatttcttcagcagtacccatattaagtacatcatcagctaattttttcatatctgactctttaactgaagttattaactttctagcaggaagtattgatattggagacatagagaactcgtctaatcccatacctaaaagtattggtatcattttttggtctccggcagattctccacacatacctgcccattttccttctttatgtgcattgtctataacagtctttataagtcttaaaacagctggattaaattgattgtaaagataacttatcttttgattcattctatcaactgcacaagtgtattgaattaaatcattagttcctatagagaagaaatctacgtgtttagccaatacatcagatattacagcagcagatggaacttctatcatcataccaatttctacatctttagcataagccacaccttcagaatcaagttctgctaaaacttcttttacaacttctttagcttgtaacaattcttctaaagatgaaatcattgggaacatgattcttaatcttccatgaatactagctctatataaagctctcaattgagtcttaaatatatcttttctatctaggcaaagtcttattgctctgtaacctaagaatggattcatttcaggttccatacttaaataacttaattctttatctccacctatatccaatgttcttataactataggctttccatccattccttctaatacagctttgtatgcttcatattgtatttcttctgttgggaaagaatctctatccatgtataaaaattctgttctataaagaccaacaccttcagcatcattctttattagaccttctatatcgttaggtgttcctatgttaccagctaattccacatgttttccatctaaagttacagatggttttccttttaatagctgtaatgcttttctctcatcttcatacttagcttttaattcagtatatttatttatagtctcttcatcaggattcacaattacttcacctgtgtctccattgaaaactacaaaatctccatccttaacttttgaagttatatcatttaatccaacgattgcagctatttctaaagttctagacatgatagcagtatgagaagttcttccacctatatcagttaaaaatcctaaaaccatttttttattcatagttgctgtgtctgatggagttaaatcatgtgctattaatacaacttcttcgcttaaagcagataaatcaacaactttaattcctaatatatgtctaagtattctatttgtaacatcttttatatctgccgctctttctttcatgtactcattgtccatagactcaaacatgctaacaaacatctcttttatttcatttaaagcatactctgcatttacactttcagttttaattttatctattgcagaaccaattaactctgggtcttctaaaactaataaatgtgcttcaaatatttctgcttcctctgctcctaattcttcagaagccttttccttaacttttactaattcttctttagaaactgcaactgcatcttctaatttagcaatttcagcttcaacattatctatagattttttttcaattactaattcactatgttcaactactaacgctttccctaaagcaacaccaggagaagcacctattcctttgtaagccataaccctacctcctaaaaaatatcatctagcacataaactctataaatttatataaataatttacatttttatagttttatttacttataattttttattaaattttataaactgtttgttactgtatttttactctgaatttatgattaaaaatatcttatttcattttctaaaatatttatatttttatacccaattaacaatagtcttaatcttctgattaaataaacatgaaagtaacaaagaaattaaatatctacaaatgttggtctgtatatgtttaatacttctctgttactttactttaagtaatattagattctaaatatcaaattttaaaaaattattatatctattctccaaatccactttcaactaattcaaccattgcagctaaagctacttcttcatcttctccatttacaactaactttaattcttctccttgagctaaacctaaactcattattcccattattgattttgcatttacagttttgtcttttgctacaacctctactgttgatttaaattcagctgccttcttaacaaacattcctgctggtctagcatgtaatccacttgcatttttgatactaactactttttccattttttaaatcctcctataaactttacattttatattttttaaaattgttttcctgttttttactttaatggtactaagtggtacttttttgtcctatggtcattttttgttcccactagtgctacaaaaatattatactactaatatacacttttttcgagtataattacaaatttttttttgttttttatttaactttgattttttatgtcttttataatacaatttgtcaataattttgtgtttttgttctttttaatactaattttaggtctaacttcaaaattagaagctaaatttctattagaatcaatatttgtatttacaacatctataaccttgttaaaatcatataattttatcctgtttatattattttcttcaagtttcttttcatatatacagtaaaacaaatctttatatgaaaagtcctttggcaatccaagcacctcaccaagctttggtattacactttccataacagttctaagtgaagcatctctttttatattcaataaattacagatatattgtattgtttcattgctcatacttctaaatttatcaaaacaatattcttcattatatttatactctacatcaaaataatacttaattccagtgcatctttcatatgctttcatagtatctaagtaacctagtcggatgtttttttctacattatctctatctttattaagagaacctcctagatattctgatggtattatagtttttatatttatattttgatgtcgatttagattcattttcccaataaaatcatcaatcaacctaattacaacaacatcttcataacctttgtcttccaagagtcctattggcatgttatcacaaaacattccatcaagatacaacttatcatccatcatgttcgtttgaaaaataggcaaactggaactagcaattaaataatcaatcaatcttcctttaggtatatcttcgatatacaatggatatggattaatttttttatcccaccagaccgtaacaagtccaaagtctttttttgatttccttattatgtcttcatttaatgttgtctccattagttgtcttaatgggcttatatctataccttcattttttctagctttatttataagctcaaacactgcattgagatttttagtagtgaaatctacatttttaaacctctcataggtttctctatcaatattcataaaatgagtatagtcataatttaaccaaatatcttccattacttcaatatcattttgaattatatatgctccatttaaagcaccaattgatgtgccagttactccttgaaactctataccaagctctcttaaagctttatatgcacctatttggtaggctccttttgttcctccaccttctaaaactaatcctttcatattatcacctactatatcaaaaacgtttctgatttttattcttaagcaaatattaattcaaaaaactatttttagttattggagaaaaataaaattgcacaaattcattcttattttatcaaaaaaatattgaaaagtatatatttttaatattttttatatggctaactttttatttctaaatttaaataaacaattaaaggattataattttttaatacttacaactgcttatatacctaaagaatccattatcaagttatccatttttatctgcaatttttctacttttcctttatctatagacttatttaataaaattgatattatttgctttgataaattctctatctcttcataattattatccctaaaaatccttatcttcataaccttattaggatagtaatcatatatatttttactcatttttttagcagttattttaaagtatttatcataaacactggaatttaaaattccaactagatattcatatgaaaatttatctaaatactcttcttttataaaaaaagaatatacatctgcacttgaaaaattgttatcataatctatagcaaatctattttcatttgatttataaggatacattatcttttttctttcaaagaaaagcttttctctaccccattgaagttcataccatttccttattccacttttacattctcttctgttttctaattttgttttatatagccctataatttcatctagtatctttttatttgtattctcattatctatatcatttgagtatattagcctatattcacttttatctactatatatttatttatattcttactttttatccaacattttaaaaatttatcatctacaaggttcaactttacatcatctttacttaaaataaacgctttatcacaccctgtaattattccttgaaaacttattgctatatcttccaagctatatttacatttttcttgtatcttattataaaaagtttcatcatctttatttacaagtatccattcgtcagatagcaatctctgatttatattaaaatgttcaaatttgctactctttagaagttcttccaatgtttcaaatttatttatacatatatcctcatttttgattttaaatacatctatatatgtctcttttgtttttttcttatcaaaagttagaatacaactagatacccctatgtttttaaatatatttgcacctaaaaaatccactatttcttgaacattgacatttgatttaatatattctcttaaatctttacctgatagactttctaagaaatatcttggagttataacactgccaacccctccttgctttaaaatatctataatttttttataaaaacaaaaatataagtcagctttatccttataaacttcactatatttttctaggagaaattttttatatttcttttcaagttttttatgaccaatatagggtggattacccactatgtaatcaaacttatatcgccatttctttttaagactatcacaacaaaatagattaatctttatatcagattcatctaaatcatttactacctttttatttgttaagctatcttttaatatacttatagctttttcatcaatatcagcaccatatatacaatagtttaatatatgacggtgtatgttatcaacagtccaataattttcatcatacttctttttcaattcatatatattttcctcaaataagtcatataaaatatcatatacttctaaaagaaaatttccacacccacaggaaatatcaagtattcgtggatatggatttttaattatatcgtgattttttaaagttttttttacaatataatctacaattattttaggagtataatatattccacttgcttttttagtatctacatctaagctattctcatactctttagacagtagaaaattatcttgagatatatcatccataaccgaaaacctccaattattatcatagctgaaaattttttattctagtatttgtcttatagattttctcgataaaagtttataaatttctttttctatttctagcaattcacgatttactttacaaccttttaagcaattactgcaattagatacatatctcgtacatttatttatatatatttttccatcaattacttctacaatagttcttagacttattgtatccaatgacacatttaacatgtatgtcttgccatcttctttgttaaaagtaagaatattgtttgcacaaagctttctaagcagtctgtatagtgttagtattggtatatcttcactttttaatatcattttagcatctattggtttatcttctccattattaaatatagctcttatgattcttattgaataatctacatcttctgaaatcatccttactcctcctcaactgtcatgcatttatctaaaagagtatctttcagatttatataacttccgtcagtaagaagttttttataattcatctcatccaaaggtttaaaaaatacataaccttgtatgaaattacatcccagttcacttaagactttgacctgatgcatatcctctaccccttcacatataacagttacgtttaaatcatgtgaaaggttaataattgctttcaccataaactttgtttttgtatttgtaactatatccaatataagtgacctatcaatttttataatatctagtggtatccccttaagattgataaaatttgaattacctactccaaaatcatctaatgatatattcatacctaaagatttaatctcataaagcctttcacttataaattttacatctcttagcgctgtcgtttctgtaatttctaattctataagttcttttggaatattatatgtattaaacatcagtttaaaaaaatcaactaaatcatttttatatagttctactctagaaagatttattgagactggtaagacatttataccttctgaaatccacttgttaatggtaataaaaacttcttgaattagccatctaccaatattgtttatcagaccatttttttcagctataggtataaacttatttggtccaaccatgcctaatgatgggtgcaaccatcttatcaatgcctctgaacctataatgttacctgtacttgaatcaactttaggttgatagtgaattacaaactctttatttttaatagccaagaataaatctctctctattttcataattgattgtatttcttcttccatagcattatcaaattctacatactctatgtgctttagtccttttgatttaagccttgccatatcagcattatctatagctttttttatatcaatttcattattgttaaatttataaattccaatagaagcctcaatatttatatccattttaaaactgtcaatctgacttaatatcataattttattcttgataagatttactaaataaggaatcttctgttccctattttcaagctttattattaatacaaaaacatcactttttaactttccataaatagcttcttttccaaaataattttttaagttacttaaaatattatttaacacttcatcccctagctcataaccatatatatcatttataagtttgagtctacataaatcaaaacaagccattacacagttttctttttcattactgataatataattttgaacatgttttaggaagttctcatctttagtaatatttataaacttatctgaattatttatcaatcctaaattaattttatcctcatacaacttaattttaagatatgaaataaatacatttatactaaacaaagttaataaaattaaaattaaaactttaatatctacctcaatatgtcttgtaagtaaaactattcctaaaattccaattataataaaaattattttatttaaactgtaaatttttgtcatgctatttttattcatataaattcccctattttttaaattatcttacagttaaactttatatatactaattataaagcacaattgatagcaaatcaatgcaagttaaaatcacatataaataactacattacattatactaaatttatttttttaaattttataactataaattttttgcaaaaaaaactatgaaattagatatagataaaataatttctaatttcatagtttctaaattcaaacaatgtttccaacattacgaaataaagttaatacaatttacacagttaaacttttaaatttatcctcacattaaagtaaagttaacttacttattccctttagaatctaggtatgaaagtacaccttgaacaattccttccgcaagttggtcttgatatttttcatttattattttttgttcctctgaaggtgttgttaaaaaaccacactctattaatatagcaggcatatttgattctctaagtacttcaaagttattttcaactattcccctatctctaactttaacataggatactatagtactttgtactgtctgtgcaagttcttttgaaccatctgtagctttattcctataccaagtttctatacctgttgctgtattaccatttttctctgcatttaaatgaatagaaacaagcacatcagcagaactattatttgctaagatagctctatcctttaatgatatatatgtatcatcagttctggatactactacttgaatatccttttgtttagataatttatttgctaatttttttgcaatttgtagatttaggtctttttcatatctattactggtcttgctttcagttcctttatcattgcctccatgacctgggtctataaatacagtatattttttctttttattttcctcttcattaccaaggtcaaattgttctgagttaactttttgttgttgactagttttattacttttatccatactttttaccaaagctactacaccttgagtagccttaaatgcaataaataaaaataaaactgtaaagcaaatcaacactgctaactttttcttatttaattttcgcttttttctattcagatgactggtctttttagatttgtttcttgaattattgttattattgccttttgacatttcttcacccttcttggtataaatttttacacttttacatattattagtgttattttaccatcaagaagtttttttttcaataatttaaaacactctacaaccttaaatcagaatatttttaattatccacctaaagtgacatcttgtgtatcataccaactaaatgcgtcctttatatcgtcactcttaaaatctggccaataattatctataacataaaaatctgcataaattgattgtacaggaaggaaaccacttaatctccttcttccaccccatctgattattaaatctagtctggatacatcaaatgactgtatgtaatcctgtatattatttttatttacattttctactcctgatatattatttaagtcccaataccacccataatttaccagaagatttgcttttatttgaccttctttggctttaattctattagtatatggtaataattcttctggaaacattggagattttgtatttcctacaactaataaagcagcaccttcatctattaatatatttgcagcatcaatacatgcttttgtaaaagcttttgtctgcactgatggacgtcttgtattatcagttgtaaatccataaaaagtcacctcttcacagcctaaatctctacataatctataagactctaatccagggtctattccactttcatatcctttatcttttgtcataccattttgacttgcccaccttctatttccatccggtataattcctacatgttttggtattctcatttctaatcacctctcaataggtattattatcaaaatattacattattaatcaaaactgtaacattaaatacatttatttttatataattatgtagtaaactaatttaagacagagtttaaaaaacttggaggtttatcatgaaaaaaattttaatattgtttttttcgataatcttatcattaggaatggttagttgttcttcaagtggtgattacaaaaacgtttctacatcaaaaataaaaaaagcattaaaatcttctgatttacttataaaagaatcaaaaatctttgatgcaaaggactttaactattttaatgatgtagaggaagacataattcaaggttttgtaattaattcttctgaaaaattatctctagaagatattatcgttataaaaactgacgaggtagataaaatatataaaactctagaaaattataaaaaagatatgatacaagcaccttttggagaaggacatggagaaaaaatcaattctgaaatagcaaataatactataattgagaaagcaggtagatatgtttatttaatttctgctgaaaatgcaactcaaatagaaaacaaaatactgaatatcataaaaaaataaatatctattattgatgtttattaaatatcaatgtaattttcgcataaataaacttatttatcaaaattacattgatatttttttgatttcttcaaaataatctttttcatctatacatatgactatccaatttttatgacctcttttatcttatctacaacgccattttcagtatttctttttgctctaaatctagcaatttgtttcaaatgttcatttgcattttccatggcataactatgataggcacttttcatcatttccacatcatttaactggtcaccaaataccatagtttcttcatattttatatctaacattttttgtactttttttatggcactccctttatttgcaccttttgcagttaaatcaagccactccactccagaaatacatacttgagctctatcagaaaacttttcaaagtagatattattattatgttctgcacctttgaagtcaaatacagctatcttcaatatatcgccttctactttcgtcaaatcgtctacaattttaaactttgcataataagtactaacctcttgtataaacgcttcatctttgctttctatataagcgtattttttcccactcattacaatttttttcccttttatacttcttgttgtctctatgatttcatttactaattctttatttaaaggatttgataatatttcttttcctttatatactactagtgttccattttctgatataaacatcatatcatcttttatatcttcaaatttttttataagattttgatactgcctgccactagcagcagaaaacattatccctctctctcttaattttttaaatactttataaaactctggatttatttcgctcttttcatctaacaaagttccatctaaatctgttgctattaattttatcatacatttcctcccccaaattattaatttataattattttttattaatttttatcggtttgaattttcaattcttattatacactaaaaattttaaattacaatttacacctttcataagatgctataactacattcaggaaaatatttttttcaatatacacatcagtttataaaaatttaagtcttcatacaattatattccaataaaatcaataataactacacactttcttctataaaatactataaaaataattatattatgacaaacttatgctaatttattgtgttttttattgcttatgtaacaaatttttaatataattaactatgtgtaattaaaaaatttagaaagtaggggatattattgtcaggactcaaaaagttcgttatatttctagcccttttagttatagcatttcctgttagtatatatggatatgtttttactaaattaaaaactatacaagatgatagtataaatacagaggcgcttagtagtaatgactataaaaacgaagaaaatatcacaaacatattattgttaggtacagatgcaagaccaggagaagaagtttctcgttctgatgccatgatgatacttactattgataataaaaataaaagtcttaagctaacttcattaaatagagatacttatgttgatataccaggacgtggagaacaaaaattaacacatgcctacgtatatggacaagctaacttattaatagaaactatagaagaaaacttccaacttgatatacaaaactacgccgtagttgactttttctcttttatggatatagttgatgctttaggtggagttactgttactgttgataagagtgaaataagagaattaaataaatttattcctgaaacttataaatggaataaaaatgacaataaaggttctcttaaatatataagaaattctggtgagcaaaaattaaatggatatcagacacttgcattttctcgtataagaaaaaatgatagtacagatgaaagagatagaagacaaagaagtgttatacagagtttaataaatggtgttaaggatttaccagtcactaaatatcctaatctagttaacacaatacttccgtatgtaaaaactaatatgaatcctaatgaaataatatctttaggaaaagaacttttaagtataggaaatttaaatttgaaatctatggagtttcctctttctactgaaaatggtagaaaaataggtaatgcaggctatgtaataccttttgaggaatatgaactagatgcaatgcatgatttcatatttaaagatattatggttgaagattagaaattccaaaacaaaccaataatttgatgataaatacatacctcttaaatgcaaattgctttgtatttatggggtgtgtttttattttaaaatataaattacttttaaaaaatatattatatatacttttaactatacatataggtcgataaattttcttataaattatatcattgtcttttttttgtaactgaaacaagtattgaatatatctcaatactttaatataattaagtgtatgctattaaaaaatatacaggaaaaagaagaaagaaggggtacttttgtcaaaattaaagaaatttgttatactactggctttcttggtagtaatattccctataagtgtctatggatatttttattataaattatctgctattcatgactcgagcataagtagtgatttattggataacaatgaccataaaaatgaagatgggataattaacatactacttatgggaacagatgctagaccaaatgaagattcttcaaggtcagatgctatgatgatacttactattgataacaaacacaatgatatcaaacttacatcattagctcgtgatagctatgtagacatccctggtcatggtaaacaaaaacttactcatgcttatgcttatggacaagctgatttattaatacaaacaattgaagagaattttaatattgatattcaaaattatgcttgtgttaatttcgaatcatttatgtatataattgatgctattggtggcgttgaggttactgttgaaaaaggagaaatacgagaactaaataaatttattcctgaaacttataaatggaataaaagtgatgataaaggtagcatacaatacattagaaactctggaaagcagactctaaatggatatcaggcactatcttttgcacgtatcagacacaacgatacagcctttgctagagatggcagacagagacagattatacaagctataatcaagaaaacggaaactttacctgttactaaatatccaggtttattagatgcagttcttccatatgttaaaactaacatgaagcctaatgcaatactttctttaggagctcaagttttaaaaatgggtgacttaaatattaagcaatttgaatttcctattgatgatgaaattcatagtacaggtggtatatatggaaaagctggatgggttcttagatttgacccagatactttagacatattacacgattttatatttaatgacatagagtttaaacaataaaaaattcaacataaagtttattaaaaagtataagattaattactaaaaaagaactatatcgcataattattttcaagttgctgtgtacacttgattacaaaatgcatatagttcttttttattttctaatttatgatgataattttcattttaatctacatttataaaatactctgtattttaaattaacttttttattacttaactaagtttaagaaagtgtttaatgtgttttgatttataccatctccagcttcgtatactagagcagttttcttaggctctaaagcagttttctgagcagatgttacactatttccaagcataactactggtgattttaatttagctgctaaaggacctgatgttaatgcatctaccaattgattacttttacttacaaacattgatgaatattcagcatttggatagaatttttgtattacttttccatttgtttcttctctattttctccagctattctatttttagatacatcatttgtaatgaccttatccagcttatttattactgaatcagatatacttagattaccacctataaaataagcatcttttacttttaaatctgatatccaattgtaaacttcatcacttacattatcttttgatactagtactattggttgcttttcttctcctgcttttgaagctatagaaagagaatctgcttcacctgtaccacttgttatatatagtttttctactggattagtttttactaattcttttgctatcattaaagatgtactatatctatctgaaccaccaactctatttattgatacatttgacaatgtatcttttatctcactctcaactttatctccaatagagttatttcctccaattaaaataactttacttggattaagtctttttaactcattcttagtggatgtaggtatattatccttatttaccaatagtataggagcatcatttgatgtagcaagtggtgttgatgttatgccatcaactatagagtacccatttactaatactactgtatctgaatttgtagcccaaccttttttacttattgctactgctgtgtcatatctttcgtcgcctcttaatttctccactttaacattagatggtggagtaactggttcttcactactagaatataaactctttaaatccttttgtatagaagtactatttgctatatctttagctgagaaatacatactaccttttatttcactatactttctatttaatgttacttgttgtactatttcttttgctatattttgtccaccataactagattgaccttgcttatatataccttgtcctatgtataagtctacatttgttccttttacttcattagcccaccatgccactaatttagaataatctgctgctttaagaccaattggccagtaaagttgtggaactacatagtcaatcaatccttgttttatccatgctcttgtatctgcatatgtacctacataactttcattacctgatgtatctgaacctgttgggtcactactcttatttctccatatacctgctgggcttacaccaaatacaacattaggctttatactctttatagacgcttttacatctctaagtagagtatttacattttctcttctccaattatccttattttgtccttttccatatttttggtatgttgcagtatcattgaaacttactcctggatagaagtaatcatcaaaatgaactccatctatatcgtaattttgaactacttctgctatactatccactatgtactttctaacttctggtaaacctgggtcgtagtaatacttatttccatgtttaactacccagcttggatttttctttgctggatggtttgctggcaatttatctatgctctcatctgccatagttattctatatggattaaaccatgcatgaaattccattcctcttttatgtgcttcttctattaaaaatggtaatgggtcatatccagggtctttaccttgtgtaccggtaagatattcagaccatgggtttatatttgatttatataaagcatctgattttggtcttacttgaaccactgctgtatttattcctacactttttagtttgtccaataaatctgtgtattcctttttttgcttggcttcattattcttagtcttaggccagtctaaattataaactgtagatatccaagcagctctcatttccttatcatttgatgaatcggcaaatgaacttacactacacatagtaagtgtcattatcaatgataatactaatatacttatttttttcatttcatcccccttaattttttaaatttattttttctacaatatacttcttattaagtatatctaaaattcatattatctgtcaaatattgaataatatagttaaaatttatatttgatatttgattataatatgaaataatttattataaaaaaaacagcaaagaaatttatcttctttgctgtttttataacgttcatcactattttaatattactaaactcttaaatctctatgtaaaacattaaatgtaattatatatttaatgttaatattcaatcctatgtaaatcaatatctattattattgtaaaacacgtgtagcagttataagtcttcttgcataattagttcctggagccatgctagtaacttttactacatctcctgtttgtggtgaatgtatgaatttagaatctcctacatacaatccaacatgatttattgaaccacctgaaccaaagaaaactaaatctcctggttttaattctgctcttgatactttctttcctactgttgcttgtgatcttgatactcttggtaaattaacccctgctccatttttatagacataagaagtgaacccagaacaatcaaaagcatttggtccagttgctccccatctatatggcttaccttgttgcttaaatgctaagtttaaaacattttgtacctttgcatctacatttccaccttgaatagttaaataatctccatttacccatcctgtaacattgtcaacactttttattttaatccatccatttgaatgtaattctaaaacttcaactttgtctcctgtgtttatctttcctactactgcatcatttgcactagctccacttcttacatttaaaaaatcacactggtctactgttgcactcataggtgaattagttggctctgctgcactagccgttattgctcctgcttctactgtgacaactcctgctattaacaccatagctataaattttttcaatatatgttttttatttttaatattcatcataatctcaaatacctaatcctttcgaaaatttaacattttgttccttcgtttccaattcctaattaacattctatcttacatcaaaataaattgcaaccttttttgtaatctttttgtaatctttttgtaatcttttgtttctttttagtatatatttgtttctttttgctccccctggttacaaattagaaatatattctacttttctctagttgttgcaatttctttgatattagcatcttctggtttaatataagttggcactaattccctcataataccatctattttttcaacctcttcattgttagtaatttctcttaaaagttttaagtattttgttattttttctctatcaacatctattggtctaccaataaaaatctttttatgctctgtatccaacagaccttcttctgacataagtagttcttcatacaacttttctcctggtctaagaccagaaaattcaatttttatatcaacatctggctcaaatccactgaatttaattaagttttttgctaaatccaatattcttacaggttctcccatatcaagcacaaatatttctccacctttagccatagccccagcttgtataactaagcctactgcttctggtattgtcataaaatatctaatgatatctggatgagtaactgtcactggtccgccatcttcaatttgcttcttaaaaagtggaattacactaccattactaccaagcacatttccaaatctaacagcaacaaattcagtctggctttcagcattcatagtctgtataatcatttcagcagctcttttagtagctcccattatgttagtagggtttacagccttatctgtagatataaggacaaatttcttagctctatattttgaagacaagccagctatgtttaaagttccaaatatattattctttatagcttcgccagggctcgattccataagaggaacatgtttatgtgctgctgcatgaaataccacttctggtttatatttattaaatatttcatccattcttttttcttctcttattgatgctattactgtctttaaatctaatttatttttatattttctaagtaattcttgttgtattgagtaagcattattttcataattatcaactataataagctctttaggattaaatcctgcaatctgtctgcaaagctctgaaccaattgagcctcctcctccagttattaggattacttttccctcaatgtaattacttatctctcttaaatttgtttttataggctctctacccaacaagtcttctatctctacttctctaatctgttttatatcaacttttccatctataatttcgtaaattcctggtattgtctttattttacagttagtgtttttacatatatcaataatctctttttttctacgtttctctatgtttgctattgaaaagattatctcatctacattgtacttttctaccacagcttttatatccgaagttgttcctacaattttcacattatggattattcttccaattttatctttatcatcatcaattatagccactgctacttttttaagttctgaatttctttttagttcctgtataaccatttctcctgcatctcctgcaccaattataaggatatttgaaacctttcctctagaatatgtcttgttcatgactattcttatagctctataagctattcttgcgccacttgtaaacattataataaatattgtatttaatacataaaacattataggataatcaaaccctaataatttatttattatataaatcggaattaaataagctaaagttgccacaaaaatagatataatttcttcttctcctgcatatctccataatgtgttgtagcacttaaacaatctaaatgatactatatgaagtactatatatatacacactgaaattattatatcattagtggtaaatgcatttaaattacctgtcaagcttaaagacattcgaaacgctactagtacgctacaaatatctagaattaatagtgttaaatgtctaaatttatattttttaaaaagcctattaaaaaagctttctttctctaaatctatactttctcgcataactagaagccctcctttaaacagcaaaagctacgcacctaagcatagccaacaacatctatcttttgctgtattttttcattttattttttatatttatcaaatatagaatcataaattttttctatatcattaaagtttaaattaacctcataattttctctaacaaattgacgccctttcttacccatattaagtctaagttcatcattttccattagttttattatagcattttttatttcttctggttgttttggttctacaattaagccagtttcattttcccatacagattctggatgtcctcctacatttgtaactataacaggtacttcacatgcttctgattctatagctgccactccaaatccctctcttaaagaaggaaatacagttacatcaaaagaattaaaagtcttgcttacattttctggagatattcttcctaaaaactgaacatcattttctatacccaattctttagctaaatttattaggttgtccatctgacttccagagccacctattttaagaattattttcttatctttatattcatctttaagcatcttaaatgcttgtattaaatattctattccatattttttttctaaactctttataattcctattacaaaagcgtcttctttttctacttccataggcttaaacctatccatatctactccaaaaaaggttacatctacatgtttagctgtatatttattagcctctttagccatatctctactatttgaaaagatatagtctgcttttctaaagttatgttttataatttgtttttgtataaaaccattattagggaaatcataaatatcagtaccccaaacagaaataatatatggatgatacccaagtagacttcctataaatccataactacttgcatactgtgcatgcaatatatctggctttatttcatttactagcttctttatctgctttattgaacctaagtatcccgtttttttagaaatattttcattttttaattcttctacattagaaccaaaattataaatttttattccttccatgtgacctccatttaaagagattacatgaatgtcatatcctttatttttaaaaaaactacaccattttaaagtatgaggatttgacccatcagctaaataacaaacagtcttcataatatttaccttcctatcgaataatactcaattcctaactcttccatatctttaattttataacaatttcttccatcaaggactaaaggatttttcatcttttccttatacttatgtatatcataatttaatacatctttccattctgtcattataaaacatatctctgcatcttctatcgcatcatctacagaatcagcataaagtatagagtcaccaaatattttcttagtattatttacaccaattgggtcgtatacagtaactcttgcccctctttcaagcaaatattttatatttggtatagatggtgcttctcttatatcatcagtgtctggtttaaaagtcaaacctaaaacagcaactttcatatcttgaaagctctctactaacttagatgcctttctaactaatttaagtttttgactttcattaacttctattgcagcttttactgtttttaattcataaccattatgttcagataaccagtgaagagcttttgtgtcttttggaaagcaagaaccgccataccctattcccgcctttaaaaacttacttcctattctatcatcataactcattcctaaagctacatcttctatgttagctcctgctatttcacaaagatttgcaatatcattcataaatgatattttaagagctaagaagttatttgatgcgtattttatcatctcagcactatttctatttgtaactattataggttgattaaaaggcttatagatttcttctaatatttctctagcccattcactttctacacctataacgattcttgaagcatatagagtatcttttactgctgttccttgtgataaaaactctggattagatgcaagctctacttttacattattttttaggtttctatttatataatcttctatctcttcatttgtaccaattggaactgtagattttattactactagagtatcttttgtcacagtttcagctatttgctttgcaactgcctttatataatctaggttggctgagccatcacttctctcaggtgtacctacagctattaatattacatctacatcttcataagcttttttatagtctgtagtgtaatctattcttcctctgttgtaatttttaaccataagttcttctaggccttcttcatatataggtgctattccaagtttcattgatttaactttttgttcatctacatcaacacagactacattttcattgcctacctctgctagacaaacacctgtaaccaaacctacatatcccgtcccagctatagctattttcatttttttacctccaagtatataaaacttatactctttttttaatggcattaaaaacatagaaacaaaatacatatagactttttggtaaacttaaattttcaacatttctataagtattccaagttcgttttaatgcttttatcttgttacttgatatagaatttccaactaatctgtaattcactaaatcctcctgaatcccatatgcatatttttcctttttaagtaactgtaaccaggtcgcagtatcttgtcctcttcttaccaaaggcatgctgaactctcctacaatctccttatcaatgaccactgtagaacatcctattatagtatttctaagtaatccttcatagtcaattttcttaggagctcttgcaaccttattcgtttttgacccatcttgtctcatatatctataagatgtaaaagaaaaacctacattttcttttaacatatattctatctgaatctctaattttctactatcccataaatcatcactatctacaaatgcaataaatcgaccttccgcattcttaataccaacatttctagatactgcagctccagaatttttttcaagctttatatattttattctagcatcttcttttcgaaaactttttataatttcacttgaattgtccttagaacaatcatccactaataaaagctgccaatttttataagtttgattttggattgactttatcgtctctgataaaaactcttctgaattataaacaggagtaattatcgatactaaaggctcattcatatttttactctccttatatagcaactagcagtactataccaacaagtttacttagatactaattttctttgtccaatatatttgtaatatcctaatgggaataatgctaaatacaacaatttatcagatacttttcttaattcaccaaaataatgactatcagacaacaatgagtatctggctaaatttatgtaattttttatccacatatatggatatctacttaatggatatgtattttgatttattaaatataaaaactctaatgctctacctcttaatgcatttttacttaatatattcttagtcaaaccatcatccaaataatctcttattatcataggtttatttacacatataactttatagtatttagacatttcattccatactacactttctggtaaaaatctcacttcttttctttctggaaaaggaaattttataagctcatcagttacaaatactatgcttttatctcccttaacgccatacttaaaatataggtctgcaaagtgacatattttcttatcttcaggcatttctgtccctatcaaatctccacttggatatacacaaagtccaacaactccactaaatccttctttattctctaaagaatcccactcatcattagcaatttcaagagaatctttaattaaaccatcatcactatctacaatgaaaaatagctctccatctgcattttttacacctagatttattgcagtatgttttcctccattttctttgtatatatatcttatatttaatttattttctgatataaatttttcaactaactctttagtactgtcgctacttccatcatcaacaatcaaccattcaaaatcattgaaatcataagtttgagcttttaaatcattgtacaaattttcaagtaaatgagctctgttatacgtcggagtaaatacagtaaatttatatttatacattaattaaatcttcctctctgtctaactttttttgattccgtttattccataattaataaagtagtatatagctttgtataaaggtattttttctatatttctatatatattccaagtccacatagcagcttttattttattaccacttagggaattgctagattttctatataatgctagaacttcatttattccatgagcaatatgcccttttttcaatatcgataaccataaaacatagtcttcatgtcttacaccactcattcttatttcaaaatccaatttagacttatcaatcacaacagtaagacatcctaagatatttccttttaataatcttttataatctacattaggtggaacttttattactttgtttaattttttatcattttcatccatcagttcatatgaagtaaatgaaattacatagtcattttctaacataaaatttacttgtttttctaacttactgctattccattggtcatcactatctaaaaaagctataaattgtcctgttgccttacttagtgctaaatttctagcattagagacacccttattagtctcagtctttatacattttattctactatcctgttgcatataagatttgactatattaggactattatctgttgagcaatcatcaataattaacatttcccattcttgataagtttggtttaatactgattttatggttgcttcaataaatttttcagaattatacatgggagtaattatagatactaaattcttcttcatattaccttcctcatcatttataaaatatttatttaattttacttaatacacaatcatatatcctcttgcagttcttattatcattatatctgaaaaacttatttctttcatttttttggttatccataacctcaaaattattttcaataatatcaataagtttattcacggcttcatcattattataagccaaagacccaaacatttcactttttaaatctatatatgaatcaactttttccatatattcatccaaatcgaattggtaaaacaagataggtctattcatatacaaaaagtctatggctacacttgaataatcagttatatttgcagctgattttctgatttcatttgctagagttacccctttatctaaaaacacaattcgttttcctgttatattttcttttatatcatctataaactcatgcataagatgatgcatataaatttttacatttatatctttctcatctaatattttatttaatttgtcatcatttaaaaaattcattatatttttaaaataatctgtatccgtaaattttcctgaactaaattttatccaatctctccatgtaggagtatataatatatctcgagtttgtgcaacttcatttgttggtaaattgtcatatcttgcattcccaattatataaactgagtcatctaacattccccaatcatttaccataacatttctttcaaattcagaacttgctgtaactatattatagcttttatataggttatctataatatttttgaactttttgttcataggttttctttttttaaagcttatagtcccatgatttaaaaacacttttatcgtttttttatgaaaataattaagaacaggtacagcaaaattgtatggtgctatatctgctgatggtgcatgtgaaaatactatagcttttgaattgtaataatacagatagttttctacacttcctcttattaattttttgcctggaattttatcaaatactttactgtctttatttactacccaataagtttctacatcattatgttcttttagcatatactcataaaaaaactttgaattatcattgtatatatcccctgaatgtccacctataagccagatatctctaccattaaacttatgcttattaaatggatatataaaaaaagccaaaagcatatttattaaaaatttaaccttgtccataaacaccatcctcattataacttgtactgtctaaatccattaattcttccttttatagtggcactatgataatctctattggaactcaatataagaccccctatatttcttacaagttttgataccataacttttgcaaacgtataattttttctatagactatttcctttttgcaaagcgctccaaagcctcttccataattataatctttttgatacttttctttagatttagaatgtttttttgcaggatggtaaattatatcatttccaaagtattttcctttaaaacctaaactcaataagtttaaaacataatctatctcttcaccagcaccaaactctccaccaacacccaatttttcatcaaatcttgtataatctttaccttcaaaatcaataaaaaaagttatggatgttatagtatccaaaacgttggaacttgtgatatcacaagttccatcatacattttcttaaatgcatcaactttatttgaatccatagttttgcaactgtatattttataatcttcatttttattaaagaaatttataactttttctaatgtatcattttcgtagacacaatcatcatcagggaaacctataatttgccctacagcattatctatgcctacatttctgttataactcaatccttttttagagctttttatatactttatatctaacttatcaatgtatttatcaactatttctttaactttgctattatcattttggtctactactataagttcaaagtttttgtaagtttgattttctaagctatccataagtaagtatatatcatcatatctatttaatgttggcattattaatgatattaacattactacctcctacttttcatcttccacaaatctatttcccttttatcatttaatatcacttcttttattagtaatactactgcaaaactaaatgaagcttctaataataaattttctgcaaaagagtatagtaaaaatataaataaagctactaaatatgcttttttatctttttctataaagctttctattcctttatacatcaaatacataaataatatacaagcaactactcctagtacactaattatatatacataagaactatctaatggattagttgcttttatagcaggactatatgaatttccaaaaggttttagaaaattccccttttcagccaagtatacatgccagaacttaggtctacttgctaataatctatttaataaagtgcttttatcaaatattgtaccaataattacactaaatagagtaagtattattggtaatgtctttaggagcattggcagtccttttattttttttatatctatccatcttattatttctacaaatattaatcctgctaatatagtgaaaaatccagttctactatatgtggtttgataaacaaaaaatgcagaaccaaataaaattattctatcccatttattataatctttatatcttaagaatatatatgctgcatatatagtaaccatatgataaaatacactatttggattaccaagtccaaaatccattcttgtaacaagcatatctattttttctatatatctatagtggacttcctgattaaatattaatgaaggaaataaattaaataataatatagctaccattaaaaaacatgccgatattattaaataatttttaactataaatttatcatctatttgcttagctgatacagctaataaaacgattaataatatagctccttccctatttaataaataaagtaagacacaaactccaactagtaccatttctgttatactttttctcttatcaaataaaaaaagtagcattagtattcctattgaagaataaaataacgctgatttaatcatccctatatctatatttgggtcaataaatgatatcatatactttctaagtaatatgataaacaaaacaaatatataaagatattttctaatcataatatttctatcatcatttaaagtcttcattttactttctcccttttagcttcgtaaagtattacttgcaaatattttacaacacttccatatcttatttacacctgttaagtgtttgctttctaagaaataatttctctttttagcccaactttttccccaccaatgtatcccaaaagtgttttctgttatacattctggtgtaaagtcttctttaaatccaaaaggataaaaatattctttgtcgtaaacacgtattccttcttcataattatttgggtcaatcttcttataattcttttccataagatgagtcattatttttggtattgtaaacaatgaagaagtaagtacttctttttcataatactccaataagtcttttaaaaaaggatgtcctttttctacacctattatagcaccatttatatactctctatcatcttcatacccacagattagcctattattttctaaaagaggagttatatcctttaatatttgcatatctgtatccatataaactccaccttgttcatagagtacttttattcttgtataatcagatatgaatgcccaaagttttcttttataacattcttccaaaaacttatttccttttatttctttctctatatcaaagtttttttcattccactctactatctcatattctggaagcttttctttccaagaatttatacatatattttctatatttccttttggaccaccaaaccatacataatgtatttttttaggaatcaaatgaacacctcctacatatattcttgtctatcttcttcttttaactgttctactatttttttgacatcttgagctttatcttttctacaaaccataactgcatcattcgtagatactactatcaaatcactaatacctattgttgatattaatttgtcatctgaatatataattgaatttttagtatctatagtaatattttcacctcttttgatgttaccttcatcatcagttggatatattgcacctagagaatcccaagaaccaacatcattccatccaaaatcaccaggaactactataacatcattacttctttccataataccataatctatagagattgattgtatagttgggtatatttcttttattttttccatttcttcttttgttcctaagtatttacttatatattctaatttttcatatacttttggcaagtatctcttaaaatcttctaatattttagataccttccatacgaacattccactattccatacatactttttagagtttacatattctttagcaatttcatagtttggtttttctacaaactccactacctcatatgcaacatcttctatcgtattttctctattaaaatttatgtatccatatcctgttgatggaaatgtaggagttatcccaatagttactagtttatcattattttctgctatatagatagctttttccaaaatagatttaaattctttttcatcttttatataatggtcagctggatatacacacataacaccatcaccatattttttcattatgttaaatgctgcaaagcctatagctgctgctgtatttctggcacatggctctggcaatatattactatccaaacatttatcttttactatatcctttaaagcttccaattgcttctcattggttactataaataaatcatctttttttgctagagaatctattctgtttatagtttcgtttattaaagcatcttctccacttaaatttataagctgtttaggtacttcttgtctactaagtggccagaaacgagttcctcctcctccagccattatgacattgtatactttcattatttatctccccttagctttttatatagaatccactacatttaatatataagatattaaattgttcaacttaaattctacatcttcttgattgtctgaatttgctccaaagtaaaatttaattttaggttctgtacctgaaggtcttatagctatccaagagccatcttcaagtaaaaatttaagtacatctgacttaggtaaatcatcaacaccatctttatagtctaaaattttatctacttttacatcagccacattatctattttaacacttctaaagtaaagcatcatctcttttattttttttattccatctataccttttaaagttactgactttaagtcctctttgtagtatccaaatttattatatgtatctatcaaagcttcatacaagttcataccttttgaagaatagtatgctgccatttcacatatcataagtgaagatacaacaccatctttatctctagcatgagttccaattaagtaaccatagctttcctcatatcccattataaaacttctatcattgctttcttcaaacgcttttattttttctcctataaatttaaatcctgttaaagtatttaaacaatctacattataagcctttgctatttttgcacctagttctgatgtaactatagtttttattattgtaggattgtttttaggaagtttattttcttcaactaaactctctaatatatatctaactaaaagtgaaccgacttgatttccatttaagactacatattcaccacttgaatcttttacaacgatacctactctatcacaatcagggtctgttcctattatcaaatcagtgtcattattctttgccatttcaatagctatattaaacactgacttttcttcaggattaggatactttactgttgaaaaattagaatctggtaattcttgctccttaactaccattacattttcaaaaccacattcatttaagacttttcttactggtttatttcctgtaccatgaataggtgtatatattatttttaattttttcccgtattcatctattatattttgtcttaaaacttgcttcttaacagcttttataaactcatcatctacttcattatctaatatagttattaaatttttagataaagcttcttcaaaatctatacttttaatagtgctgtaatcatcaatcttattaacttctgctattatatcatttgccatatctatacagatttgaccaccatctgagtcatatactttatatccattgtattctttaggattatgacttgctgttattactattcccatagcacactttaaatatctaacagcaaaagaaagttctggtgtaggctttaattcttcaaaaatataagcctttacaccataagcacttaaagtctttgctacttctatacaaaactccctagacatgtatctactatcatgtgctataactattcccttttgtttaccttcttctccttgagtcttcatgatataatttaaaacgcccagtgtcgcacgtctaacagtataaatattgattctattagttcccgctcctattatacctcttaaaccacctgttccaaactctaaattcttatagaatctatcttgtatttctttttcatcatcttttatgcttaatagctcattttttgtttgctcatcaaaataaggagaatttaaccacatctcataattattcttataatccatattttcatcctttctgactctaatttaaaatttcaaggtaattatcttcttctaagtagtttttgttttccttttcttaaaaattcaaaagctaagtccatctcttctaccttaaataaaactatcaatacagtatatacagaagctccacctaatactccagctccaactgatataatttctttaattgttcctgaacccataaatgcatatagattattatatatcaataaagtagctactgccatcacaccagatgctaccaaactttttagaccagtctttataattttatcccctccaaaatatccatttttctttttaagagatataaataacaatataactgtaattatattggatgtactagttgatatagcaatacctgcatgacctaatggtcttatcaatattaaattaagaactatatttattattaaagctatacttccatttatcattggcgtttttgtatctgaaagagagtaaaatgccctatataagacatctcttactccacaagccaataaacctagtgaatataatctaagcgctatagatgtaagatctgttgataacgcatcaaatttacccctttgaaataatatcctaacaagaggctctgctaatataatagctcctatagatataggaagcaccaccaatataatacaatttgaagattttacaatagtacttataaatccttctttatcatctttaccagacatttttgctagcttaggatatataactgttattatagatgtaacaaataatgccataacaaactcatttagcctatttgcatagttaagagcagacaactttccatcacccaaagtagttgccaataatctgtcaacaaatatatttaactgtccaacagctactcctaccaacataggcaatactaggtttactaattcttttatagactcatcctttaagtttatatatggcttatacttgtaggacttcttaaatgcaaatggcagttgaaataatagttgactcgccatagccaatagtgctcctgctggtagtatccatacgtttttacctgcacttagtgctattgctgctattattataatattatatgggattcctataagcccaggaattacaaaactgtcattcacctgtaaaaacgaactaaatatcttacttccacttaggaataaaactcctgaaatcattattttagtaaataatattgctgcttggaacttagcagggtcgtttctaaatcctgctgcaaatactgtaacaaattgctctgtaaataaaagcccaataatagctattactatagccattatatagcatatatttaaaacattattagtaaattttaaggcaccttcatctccgagtcttttctttgtctcaaagtacataggtatataagttgtagcaactgcagagcctatgactgctatgattaaaccaggtatatttaatgttaatacaaatacgtctgcatacatacctgtcccatagaaatttgcaagtacaagttctctaaggaaacctaatacttttgaaaacatagtggctgccataatccacaatgctgctttagctgtttttgacatcttctttctccttatctaatttaaactctaaaagtagaacttttaaaactgcttataaacattattctaattaagtaaatttaacctatgaaaagcttccttataaattaaaaactatttcgactcatatctaagtgccctaaatgtaatcaatagtaataatagtattaatactatacaagataagaatgttagattaaatatgctcttaaatagactataatcacctactgtatacccaacttcaactacatcatttatattgctatctttcaagaatttatcttgtgcacgacttaagttatcactacaaatcagtattggcatattttcttttgctgatactactcccaaagaaatatattcgtttacatcagatctgctaccaaagtctaatttagcagtatagattttctttatatctttttcatcataaaacttctttattaaatcaacatttgtacttgacttatttatttgctttattccttctatatttttcaagttagaatcaatctctgcaataaattcttttgaatcacctaatgcatatatttttttaagattcttaccttttaagaaatcaatttgttcctcaaacccttcatctttagcccatattattggcattccacttttagcggcataagaatatacagatatggcattctctaatcctgttgttgagctaagtaaaaatgcttcatcaaatcctactgttctatacatttctctagctatctttaaagatgtatcatatctgtcttttcctcttattctttctacttttattcccattttttctatattacgttcagcatctttagatactgcctttaaaccacctactatcgtaaccttctctggacctagttcttttagataatttcttgttactctaccaagatttttactcttagttacaactattggagcattttttgcatatgctaaaggtgttgcacttatactatctacaattgactcttcatttacaagaattacttctttagaatccttaaatgctcttttatttaattctgtcgaaatctctggtatactcccttctatcaattctcttttgggatttgcatctgcaaatacctctattgtgctagaaatagagattaacaaaactaacgataatatagtagaaatttttttaatcataagttctcattccttttcttttttgtattttttgacaataaaaaagctctttttaaagagctttttcattgattagtaatctaatattttaaaattatctagctccgtctcctgtcaatactactttaacagttttaaagagtatcttaaagtcaagtaatatactcctattttttatatagtaaatatcttctttaagtttttcttcaggagtgatttcgtatccaccatttacttgtgcccaacctgtaagcccaggttttatagcgagcctgttgataaatccaggtatttcctcattgaattgaacagtaaagttcggtctctctggtctagggcctattaagcccatatccccctttaatatattaaacagctgtggaatctcatcaattctagttttcctaataaactttccaaccttagttattctaggatcatctttttcagcccattgtgcgccaaatttttctgcgtctgttctcatagatcttaatttatatatatagaatcttctcccgcattttcctagtctttcttgcttataagttattggtcctttgtcctctattttaataagaattccaaatattgctattaaaggtaaacctatcacaagtcctattatagataaaactaaatccataattctttggtacaagtcgaataaaaccgttccttttactatgctatagtcaatctcacttgcaatttctttatctgcccctggatagcttttaattttaggtatttcacactcatcattagtatatccagacatagttacctccatattggaataaaaatttttttaattcttaatttcaacttatttctatcttatttttgacttatttctatattatactcaataatgagcagattatcaatacaagaaacatcattgtaaacaatttgattctttacaaaaatatatcatctcttgttatattttacattataacaggagatgatatgttttgctttaatattttttattttattttactgtatcttctattcctattccaatttgagttcccattgtttttactttttctgcagtatttaacttatccatatcgctcttattgtcaataaatgcacattcaacaagtattgctggataattgttatttcttaacacatataggtaatcttttccattatcaagtgttcttgtcttgattcctctatttttcatgttaaatttttctagtattctttttaagatatttgatgctgcagtcttagttgttccaccatttttatcttttactttgtaataaatttccacaccattaccagctccattagacgcattgtaatgtatacttgtaaataaatctggctttatagtgtttgataatgctgttctttctcctaaagccattgttttgtctgtatctctagtcataacaacatttataccttttgaacgtaaatattcagtagttgctaatgctgtattaagagtatatttcttttcttgtgctccaccatttaatccacttgttgcccctgaatcagaacccccatgacctgggtctatcactacagtttttcctgctgctgaacccgaattatctggttctgttggtgcattgtgttttgataaactagatgctatagaatttataacactatctttcatcccatcaccaatttgatatactgttcctgctgttttttctgataagtttgtgctatggtatgcagaaacataagtctttggagttataagtattggagcttttaatttagctgctaaaggtcctgctgttattgagtcaactattatgtcagattttgcaactaacattgcactcaactctttatctggatagaaagtcttaattacatttgcatttgtttcatgtctatctgctccagaaactctattttttgaagtaccattttttgctattttagatatttggtctataatttttgatgataaactttgactaccacctatgtaataagcttcttctaaaccttgtgaagataaccaattatatgtaccttgtggtacagagtctttattagctaatattataggttgttggtcttcaccagcttttgatgaaatattaagagcatcatattcaccagcatatccatttgctatgtatattttattaacatcatgatacttatctatttcttttgctataagtaaagatgtttcatgtctatcaactccaccaatacgagttacatttacatttacagcagatttaatttgagatactgccttttgtgaaactgaaccatcatcacctataattattacatcacttggatttagacgttttaattctgcttttgtactttctggtatatcatctttatttgcaagtaatattggtgcatcatatgtagatgcaagtggagtagctgtaattccatctgctgctaattctccattaactattacaaccttactagacccatctttccaaccttgtttacttatctcaacagcagtttcaaatctagtagctccagcaagtttttttactggcgcagaagtttttctcatatattcatttactgcttttgttgaatttgcatcacttattataaactcttgtgtaacatcataatccttaagatttaatcccatagactctaagtcttctttgtttaaaactttctgttcatctttaccatttatttttatgctttgaagttcccatacatttaagtattctgggtctttgttatagtttattacaccttcatatgaatctgtcttttcattgtaatttaaagtagcttcaagtggcatatcataacacataaaatttaatgttattgaatcagcatttaatttttctttaaattttacacttgcattagatttacttcctaacactacactttttctttgtaaatttatattaatatctgaattagattctgtatttgcagtagtattttcagccgctaaagctacgtttggtgccaccattgctacagacaacattcctgttgccaataattttgttgtttttttcatcatatcccccctaattttttggttctttaaatctttaaatcttttttaatacatcttaagcttgttttatattacataaattcaatattatgtaaatcttttttcattatagcacaaaaaattacaaattgtaaactttttgtaatcttttatggcatggtttttaaattttatcgaggagaaattttgattatatttgatagtttccgtatatttgaacaaatcaaagactttatcatctaaaaatattgcactaaattttaataaatatttttttcttgtacattatagacattactataacccagaataggacatacaataaagaaaatataagagaatcccaagttgtacctgcccaaggtgttataagttcatatgtagtccactctaccaaggtagttggataatcgactttgttcgtaagttttggaacattccaaaaaacatgactcaatatctcaaggcacatatatgtaaaaatagggctacttccaagtgctattattggggtaaatattttacttttatttttgatgtcacatataaaataaaatattgacagtaacataccataactgccagccattaaaagtacaaatgagctagaccataatcttttattaaatggaaaatactgattaaagataaaagcacctattagcaggattatgctcataaccagtattttaaagaattttttatattctcctatgttttcttttaaaagtacacatcccatagtgcatcccaacatacctgaagaaattgctactatactagttaaaaaaccatctggttcaaattctggcttgtacaaatgtcccttgaagaaatgtaaatccactaactgtgcaagagaaccttctagctcaaatccataaggttttgctaatatgtagtacccaactattataaatgtagctatacatagaaaagtaattattgtagcagtacttccaacatttaatttttttagtagtaaatatactaaactagtcacaaaatagactaatcccatacgttgaagtactccaagtattctcacagaatttaaatcaggatttcctaggtaatttaagaaaaatccaaataatatcaataagatacttctcttgaatatactaagtattatactcagtgtggatttattattttttagtttactatttattgatattggaattgtaacacctaaagatataacaaaaaaaggaaatgcaaaatccgcaagtgttacaccatgccatacagcatgtcttaattgaggatacattctcatccaagtcccaggattattgcagactatcatgagggctattgatagccctcttattatatctattgatttaatcctactattcgtaagtttagaatctacaacattatttgaaattttattgctattgctattgctattgctattgctattgctattgctattgctattgctattgctattgctattgctattgctattgctattgctattgctattgctattgctattgctattgctattgctattgctattgctattgctattgctattgctatttagattatttttctttattctagttttgtcaatacttttatttatttttttgttacattcaattccaatccccatgttacctccccaaagcttattcaaatatatactaaactacatatttatctataagtctgtttgtatataaacctgtttaactatataactttagaacaattacaacacacacttcacttaaatatacatattcttaactaagaaatttctttagaaatccaatcttatctagtatatcttgtattttattgactttttgacttatagaatctatagctttttcaattgaatctactttagcctctaaattctcaacttgattaacttttttatctatagtaccattattagttatatcactattagatgaattatctataagctttcctatatatccatcattaatcaattttgtatcattagcagaagctaatatcatcaacgtatctatatctgaatttctagtattttctataactctaccatttttgtcacgaactgacaatatagtgattgtatcatggttattaaatccaccttctccaatatttctaactataacatttaccaaagtagcatagttattcacttcaccattaggcatatctactgtaagagtctttgaacaatcaccctttatattcacagttattggtttatttgttaccattctaaaagcttcatttacagtattctcttttggtttaaagtttataatatcattaggacttgctatatttatcatatcagttaattcctcaacagtttttgcttcaaacacagttttttcttgtaaactcttaatttcatcaaaagcttcttcatttccatttccacctacctgtgttatagtatttaattttttagtactaagtatatccctttgtttcgtgtttaatttattaccaaccaaaacaacaggagactcattttttgcagccaatactccaacagctaacgagtctattagttgattctcatttttactaccatccttagttacatataaattacttaaatttgtatcagtataaaacttttctataactttggcattagtctcatttctatcttttccactcactctttctgcattaggaaggctcttttctacagctcttgaaacagaatttgttcctccaattacgtatgcttttataactttctcatctcttataaatttatcaaatgcttctactccgtccttaggactagacaaaattataggcatcttattttgagctgctggtgctccaacactaacagcatcacttaatcctttttcaccatttactacagcaacttccttaatatcttttatatccttaagcttattagccaaaatcagtgaagtttcatatctatccttaccattaattctttctacattaagtccattaccttttaacttgttctctatatctttattaagtacagcagtacctcctatcaaataaatatctttagctcctagacgttttatctctttttcagtcctatcatctagcttatcactttctgtcaaaagtattggtgctcctttagcctttgcaaatggtgtagctgaaagtgcatcagctaatgaattgtcattaactaacactacattagaactagaactgtatgccttttgacttatctttacagcagtttcatatctaccattacctattaatttttcctctgtaagtgcatatgatggtattatagaaatgctacttaaagtaagcgctattgtcagtattgttaaaatagtttttggtgctttcattattattcccccttattttgtttaaaatcttactatatttatattataaaataactttacactattttacagtttaaaattattacatttttcatcaataataagaaaactatctaaaaatatagacaagcctatttttcattatttaaatgataaaaatataaaacaacaaaaaagagtgcctcatgaactaaaaagttcattttgagacacccctttttgttattttatatttataaacttctattgaatattttttaataataaaatgtatatccttactatctttccattcactattttcctaaaagagtatttagttcattaaaagcactttcatttccatttccaccaactctaataggagtttctattttcttagacttaagtacatttttttgactttcatctaacttatttccaactagaactactggtgaatcagttttagcacctaatgctcctactgctagtccatctatcaagtctccttgactctttgaaccatctttaacaacaaaagcatatttcaaatctgagctagggtagaatttatctattatcttagcattagtttcatttctattacttcctgcaagtcttgttggatttgaaagcttactttctaaatttgatgataaagtagctgtaccaccaattatataagacttagttatttttgatgaatttaaaaactcatcagcaccttgcaactcactcttttcattagtaagtattattggcatattgttatcagcagctgctgcaccaatacttattgcatctgcaagtccatttacaccatttgccactgcaacttgtgaaacagattttatactatttaacttttgagctagagatatactagtcttgtatctatcactacctgaaattctttctactgatatacccatattactaagttgagtttgtacattcttgcttaaagaattttctccacctattagataaacttttttagttcctaatctttgtaactctgccttagtttttgaatctaagttatcttttcctgttaaaagaattggagagtcgattgctgctgtaaatggtgtagctgttaaagcatccactattgcgtctccatttactaatactgcattttgtgaagaagtccatcctttttgactaactttaactgccgtttcatatctatctgctccagttaaagattctcctgaagtagcttgtccagaagatgtttttgttatagcttttataacaaagttacaaggagaaaattcactatatgtatttatatcttcaaacttattgttttgaagtatgtagctttcacctaagtttgctttagcctcatatagatagtatccatctatatcagtttcatatgctaaagttgatttttctctattaggatttgctgtgttgtctataactactactattgctcctttaccttttggtaagctgtaagaattagtaggtacatttatgtatccagaatatgatactgttccacttgcaagttttgtcattgagttgttttgaggaactccatttactactggtgcataatatacttcatattttgctcctacagagtctgtttcaaacataacagagtcaagtttttcagaatctctgctaaaatcaaatacatttgctgctgttactttatttgacattatcttactaagaccagcatattcaagttggtacatttttttatcactatctggtttcgatactgatttcattgcatagttatctgtatctgttagtagagttttatcttcataagaaatccagaagaatcctttcatagaattaaattctccccaactgctttttactaaccatgctccatttgattctggttttacatcagatgcaaagttatcttttgaataattatcatcccatcctactatcgctacagcgtgatttaatggagccctcttatttgtacagttatatgctgtttcatctttattaaaatatgtcgaataatgtgcataacctgatgtcactgaaccatattgcattatagcattttttacagtttccttatctttattaagacgaacaacatctgttacattaaattgagtaggtgcagtatccatatttgaaggtttagttgcaccttgtgcctcagatttaagattatatggtatatctttttctaacttaggacctgcccatgctgtcagatatcctatggctgttacatttgaactacctgacatatcatctaagttccatccatattttccaccagttgcccaccatcttaaatgttcttctgataagtcatacgttccatatccctttaatttaagatatgcttctaaagttgacatacctgaaaaagaccagcatgtattaagacttccttgattttttgctggtgtagtaagaccaagatccattgggttgtatgctacacttgatttatatgctgatggaagactacttctgcccttatttcgaagtgttgtaccttccatttcatgtggaaaaggtattactccattatattttgctgtgtctccatttttgacatcttctaggtattgaagataactttcagaatactctgcagtttctactccatctagagttttatggttttctgctgagacaggtattgttgacactattaaaaagcaaactgtcaacaatgccagtagctttgacaatttttttgatttgtactttctcatgtttacccccttatatgtatttaatttttattatatcagatttctaaattaaggtcatattttattttgataaaatatggattatgagtacatattaattatagaatattatagttttatttttataatattttaagatatattgatttattaatagatgtgctatactaatgtttgttagtatctttaagtatatttatattaaattagattaggaggattatatttgattttaaaaaagcatagagagacaatattatatttattttttggagcatttactactcttgtaaatatagtttcgtatttattttttactagagttattttatttaattttatggttgcaaatgctttggcatggatacttgctgttttatttgcttatgttactaataagttttttgtatttgaaagtaaaagaattgaaataaggttcgtatttaaagaatttttgtcttttgttagttttaggctactttctggtgtcgttgaaatgttaattatgtatgtaatgattgatttgctttttgtaaatgatgttattgtaaaaatatttactaatatagttgttatagttttaaattacttgtttagcaagatgataatttttaaaaaataaatagcagattactaaatagtaatctgcaaaatgaataagtttaatgtctaaattccatcatctgtaatgctagattttccccatcgtgaaacttcattatttgaggtatctatttctactgcttctatatatgatccatctttggctctttcaataaaagattgatttgatattgtaaccatactccaacctttagtactaattttttctccaacatatttcgcagatggtttttcatcaactactctataataaattttatactttgaactctctggttttgttgatatagttattcttacataatcttttaaagcaggtatacaagattctactttaggatataaaccacgtgcctttttatcttcatctttatctgtatcattagttataggttttttaccacttattgatggttcttcacttccacttatagtattaatattacctgaattttttattgttacactagaagaattattagatattttagttatttctccacgattcaaaatatatacatcttttgaatttttaagtatcgttataagccatatttctccagaatcctcattctctattttacatccattctcatcataaacatctatcccttgtatacttccttcgttaactaaagtctcattttttatattatttattactagatcattatctatgtccccaaagttttttatatctccatttggcatatctatagttattgattgtttatatataccatcaaattcaatagttatagctttatttgtttctattttaaaagaattagttatatttttatctttttctggcttaaatcttatgatgtcatttgcatctgatttttttatagcaacattaagttcatcaatagtttcaacagtatacttagtttcttcttgcatatctattacatcttctacaacattttcattacccaatccgccaatttgaataactttatctataattttagtgtttaacacatctttttgagaactatctagcttatttcctgctaaaagtattggagaaccatttttagaagctaatacacccacagctaaagaatctattaaatcatgcttactccttgtaccatcctttgttacataaatattttttatatcagtatctttgtaaaattcttctataatttttgcatttgtctcacttctactactacctgctattcttgttgcatttggtaaacttctttctacagaattagaaatagaatatgtaccacctattacatacgatttttctatatctttactatctataaaattatcagctacttcagttccattctctgaatcagaaagtattattggcatgttttcttgagcagctatagctccaacactcactgcatcagcaagacccttttctccatttactactactattttagatatagatttttccctatctagcttttcagctaattttaaagaagtatcatatctactatttccagatattctttcaaaacttatattttctgcatttaactgcttttcaatctctgaacttaatgcaattgaaccacctattaaatatacatttttcacaccaagtctttttaattctgcttttgttctactatccaatttattactttgagttaataatattggtgcatcttttgctttagcaaatggagtagctgataaagcatctgctattgaattatcatttactagcacagcgttttcagactttttccatcctgcttgacttatttttattgctgtttcccatcttccagaacctgttaatgtatcttttgtagatgcattagatgtatttccatataatgtaacagttaaaaatgtcatagttaacaaagacactatcttttttgatattttcattaattcttacctcctaattctttcataatattttatggagcatgtacatactgtattttatttatagctagctcatcaaaatgagattttactgaatgatatcctatagcataatgtccactttcaggattccattttttatatgcattcattgcacttaataacttctcctcttgactaggtaataccttccatacctctacatttggattaacttttttaaaatccttatagtcgtatggttctacataaaatcttaaatcttttattttgccttctttatataactctagtgcagcttctcctaatgccctatggtcttcatgtattccactagctttaaacggagtaacagtttttacttttgcatctggatattcttctaagtacttaagtattatttcccttgccttttctttacttaactcaccatcatgtgctctattatcttctatatgtatattactttcttttacacccattgcttcacagctatccttaaattcttcatctctatcttttgaaaattcactttctgataaagagtatttatgaacatctttaatatgataagaacatgaccctccatcatccaaaacttttcttattatagatttactaccatctgtgcataatatgacatgtgtatcacttttttcaacatgttcaattatagcacttcccatacttaaggtttcatcatcttgatgtggtgtaaaaaataaagttgcatctaccactactacatcctcctactttataaaatgttataatttacaataaatagcataattatagaaaaagattcctgtattaattaaggaatcttctccacagtataagttattaccaacctagtattttagctatcttttgtattactgtcaattcaactccattacctatttgagttacttctgcaccaagatttaattttttactaagtgcattcctttgtgagtctgttatatcagctttagctagaagtattggacctttacctgctgctagaggtcctgctgccaatgcatctactagcataccattatttccatatccatcttttgctatatatagtttatctaattttccataatatgtttctataaccttagcattagtatcgtgtcttgtttctccttcaactctttgaacttttctatctttatcaacatcagcaagttgattttcaatttgactagatacattgttagaaccaccaactataccaatctcttttccatccatcaatttgatagcgtctgctgaaagatcattccagccatttactattataggagccttaagttcagcagctttggcagctatactcatagcatcagcctcccctttcgcacctactacaaatgcatctttaaaagaccccatagcttttgctactgctacagaagtcatatgtctatcatctccagctagtctttcaacattcttagttactgattctaattgctttttagctgtatttgatactgctgattctccacctactatatatattttagctgatgggcttttcttaattatatcttttatataatctaaagttacttttggtatttcattatcggatgctaataatataggtgcttttttagattgagcaagtggtgtagctgctaatccatcaactagtttatttgaattaactataactatattgtcagtatattttgtttgttttgctatagccactgcagttgcatatctatcatctccagctatcaatttaacctttgaattaccttctaatgcagctttggcatcttttaaatctttttcattagtactttctacagtaagctctattgcttttccagatgcatcagtatacttaatagtaaatttatactttcctgtttctgaatcttttgatgaaatatcactaattgactttgatgttccatttgctaccatattacctttaacagttaatctatatccatcatataaatcttgtggtgaaactgtatttaggtcactattttttatagttatttcagctaattggacatcatcaatatttttagctcctgctacacctagtttaacgattttatttactctaaatccttctgtagaagggtctaagtttgttcccgttgaatcaactggatttgctgttaaatcaattttttcatcaccaatacctatctctatagttttagaagttactgtgtctgttttatctcttaaagttataactaacttatctttagcactatcatatgaagcttttacatctgcaactttataaattccattagtttcagttttagctttttctgttatagaattagcctcagcggaaaggtctgctgaattttcatatttttcagttgcttctgcaactacttcatttgcactatttgttatatgccctttatctgttatagttacaataagttctttattttctcccaaagcatttactaatttctctaattcatctatattagttattatttttaattttgataaagtctcgccaacttttatttcatatattggttgtccaacttgagaaccaccagtatacttttgagacattaaatctctaactttcgaaactagttctgtagcttctttcttagttattgtttctttttttacctgtgtagtttctgcagcaaaaactggagctactgatgtacttatcattgcagcagccataattacagaaagattttttttattcatggtattttccccctaaaaaattcaaatttttattattttttccttatttaccaattataatatatatttgatattatttcaataaatgagacttattgtaataattaaccaaaagatataaactttttcttatattttatttttttaatatttatgtatacaaaaaagtaacaaaattgtaattttttttaataatccagtttataactaatagacttttcatcttctttatagtataatattaaatggaagaaagaaatttcaagcatctcttttttccgtatttctcacacagaaaaagaagctgattttcagcttctttttcatttgtattccttaattatttaattgtaattacaatataaagaatcaaaatattttatttttcatttaataaaaattacatgaacttttttagttaaatttatataagtattgtactgttgcttcccttatatttttatttaaagcttcaaacatatcatatccttctaaagcatattctttaaacggatctttttgagcataagatttaagacctatatactgtcttaactgttccatagcatctatatgatctatccagtattgatcaaccacttttaaaagtactgttttttctaactccgcaactttatcaataccaatcatcatctttttcaagtcataaaccctttttgaaatttcatatgtgctatcaattatctcttggacactttttttatctacaccgggtattagtaatgtatctgcaggcataaatgtactatataaatgtttaaaatatccataataatctctttttcttccaattaaataagtttctcctgcttcttgtatgatgtctttaaccattttttgaatatcttcttttatatcttcatcatttaacactttatttctttcattatatataacctttctttgctcattaatagtatcatcatatttaagaacattttttcttatttcaaaattcttaccttctacacctttttgtgctctttctatagcccttgtaagtgctttactttcaatagccgtattttcctttgaacttgttctcttcataagtttctctatagtttttccaccataaagctttattacatcatcttcaagacttacaaaaaatcttgatgtacctgggtctccttgacgaccagaacgccctctaagctgattgtcaattcttcttgattcgtgtctttctgttcctataacataaagaccacctaaatttttaactttttcttcttcttctttatctcctgcacctagagaaatatccgtacctctacctgccatatttgtagcaatcgttatagcatctaatttaccagctttagaaattacctctgcctctttatcatgttgtttagcatttaagacttgatgcttaataccttgcttcttaagcattttagataacttctcagatttttcaacagaaactgttcccacgagtattggctgtctagtcttatgtatccttattatttcttctacaacagcactatacttttcttcttctgttttaaataccttatcatgcaaatcagctctaataactggtctattagttggtatttggacaacatttaatttatagattgactcaaattccccttcttctgtctttgcagtaccagtcataccagaaagtttttcatatagtctgaagaaattttgataagtcacagtagccatagttttagattcattctttatctcaacaccttctttggcttctatagcttggtgaagtccatctgtatatcttctaccatccattactcttcctgtaaattcgtcaactatcattacttctccatttgagataacatagtcaacatctttttccataagcttatgacctcttaaagcttgatttatatgatgatataattctatattctttatatcagtaaggtttgttataccaaaaaatgactcagctttgcttataccacttgctgttaatgctatagttttatcttttctatccatctcaaagtcttcttctttaacagtttttacaaagttatttgctaactcataaagttttaaatcttcatcaccatctcctgcaataataagtggagttctagcttcatctattaatattgagtctatctcatctactatggcaaagtttagttccctttgtactttatgagacaaatctggcaccatattatctcttaaatagtcaaatccaaattcactatttgttccataagttatatcacatttatattgttcttttcttatacttgggtcttggttagataaaattacacctacagtcaatcctaaaaattcatatactggacgcataagttctttatcacgttctgccaaataatcatttactgtaattacatgtacaccttttcctgttaaagcatttagatatactggagctacctcaactaaagttttcccctcaccagtcttcatctcagctatctttccttgatgaattactatacctccaattaactgaactttatattgacgcattcctaaaactctttttgagacctctctaacaacagcaaatgcttctggaagtatatcatccaaactttcacctttgtctaatctaagtctaaaagtatttgtcatttcttttaattgttcattctctttgatttccatatctttttctaaagattctattttatctactattaaatttaattttttaatttcttgttcatccgctttatctaagattgcatctaaaactgacatattttttgacctcctcttttatcatacaattattattataccttaaaattatagaatagtagacaattattttattgtatagtataataatcatacttaaataaattacatctttatatatttaagtatttctcacataaaaaagagactaaatttagtctctttttttgtattcgaaaacataatataaaaagacttctcatataagaagcctttttatattattatatttatattacatacttaataaatcttttaatttatttataactgaagtagctatacctttaccaacttgaactaagttttctccattatctttatcaagaactttacttatagatacactttgatctgaagataaagaatcagtagctaatactataggtgctggagatactaatttatttttatcattatcagaaccagttaatactttaccatctttatctactggcttaccatcagaattaagagttacaccaaagtttgctgcaactggagctgctgctaaagcatcaactaattgatcttctttagtagaaccatctttagctacaaagaaattaactacttttttatcattatttaagttatcttgataataagaagattcttttataacttttgcattagttgcttgtctatcatctccactatatctatctggagatttacctgtagcatcatctattgcattttcaacatctttagatacactgttttctccacctattatatcaacttgtgaatcatctaagaaatcttttacatcatcatttatagttttagcttttccatctacaactactattggtgtagcatcaccatcagctaaatccattttaccattagcatttcttaattgagatgcaactggagctatactcatggcatctgctaatcctgttcctccaactacaaatgctttatcattatcaagacctacttcatcagctatttttagagaagtttcatatctatcatctcctgctaatcttgtaactttaagtcccatatcttttaattcattttctacttctttagatatagaattaactccaccagctaaataaactttctttgaagtatttatacctgttgtactctttatattcataactctctttatttcagcttttacgcttgaatctaatttatcttttgaagttaataataaaggagctttcttttcagaagctaaaggagaagctacaagtccatcaactattgcatttcctccaaccaatactacattatcaactgaatctctaaatatagcattttcatcatcagagttataatatttttgacttaatgctattgcagtttctattctatcttctcctgctacttctatagcatttgaatatccattattatatgttcttaaatcatccacataatcttttaagtctttcttcttatctgacttaagagttaatttaactggtgaattttcatcagcaattgaagcctttgcagcactcttagttgtaactctttttccttctggataaagaaccacttgatattttccactaacttcttctactaatctattagtatctgcttcatccccatttaatactctgtaaagagtatttaaatctgttttattaaatacatattttttagctaaatcttgtgctgttttactagaactagcatcaatatctattgtctcttcttttgcattcaatattctaagtttagttattactgggcttccagattgtgttgttggtttagcaaactcaatagtcgcagcttgatcatttgcacttgcaggtgttattattaattctttggctaaatttatagtatcactatctcctaatttaacaattttttctgtttttccatctgcaaattgaagacctgttgaataagtagttccatcaactaaaccaaactttttagttttcatagcatcttttatagtaagtttcacagcagtttcagttgaatctgtaaaagctgtatcaaatacatctgacatagacataactgcagcactacttggagctgtattttttgctcccggagtaccagcattttcgacttcaccaataatactacttgtagctacttttattgcactagttccacctgttaaattttttaatgcaacaagtttacttgtagttactttatctccctctgctggagagcttattaagaaatctacataatccccatcacctaaattgtctaatttattatctacttgtgtaaacaataatttacttgcatcttctgcactaagctcagctcctacttttatagtagatgctaaagttccctcaaagaaaattttaatctctgttatacttccatctaataaccctttttgtaattgttcaactgctttcttatacttgctctgtactactgtatatccttgatcaccagtctcaactttcgacatatcttctgctgcaaacacaggtgctgcagaagctaatactgttaatcctgacatagctattgctatattcttcttattcatttcttaaattcctcccaacattatattaaaattacatctcttcattatgtacatagaataatcatccatatattcctaatatttctcacatctctataataatccatttttattctttttgcaagtcatttttttgaaattattatttttcccaagcatatgagtttttatacccttaaactccaatatttaataacttaaaaaatttgattttacttatttaaattacttatttaaaaattcttgtgtagcatacacttctccattaggcaatatatataatccaaacccagtatatacaaaatcactatttaacatattttcattatatttatctgactttttccaaactgtaaatattacatttgctacttctctagcatcctttgttgtataagtactttttgtaacaagtggtacaaaagctatattttcttcacttctcaagccatatccagtaaatacttcaacagatttcttaccatttattacatgtgaaaactgacctttatctgccatgtacttagaccaggaattagaaagtccttctaagtttttagaaacttgtaatggctctttacctttttcttttctatatgaatttaccaaactatacatttcactagaaaccattcttttaaactcactactattcatatcattagtcttatattcaagtacatttacttctacacttattgatgtagtctttccaccaatatcagtagcttttatagtaactttgtatttacccaccttatcagtatcaatatttcctataagctctggtgtcaaatcgttaccattgctatcctttgctacgatattcagtttacttatatcaaacttatcaccttgataaatatttaaatttccaacagttattgttggtgcacttgcatccagtgatgatgcacttaaacattgttctagtgtcttttcatctattcctcctagtgctgtaatcttatcagcacttctaagtacagacttatcactatttccgtcaactaatacaataggtgcattttttgctatagaagaaccagcaactgcatctactaattgataacctttagaaagataaaattcttttgccgaactataaaaatgttttataacttttttattagtctcaaatctatcttctccagctaatctaactgcattagtttttttaactaaatcattacttattatctcctctgaaccaagagcataacattgcacaccttcttttttctcaaatggaacatttttaccattagttaaaattataggtgatccatctcttgatgctactgatgacgcactcatagcatctgcttcacctgtataaccattagttataaaaaccttatctataggttttattgaagctatttcttttgctataagataacttgtttcaattctatcattaccacctattcttttaacttctattcctttttgctttaattcattttcaactgattttcctattgaatcttcagttcctattatataaaccttctttacatcttttaacattttttctgtgtctgatggtatactgtttctttgtgataataatataggtgctttaactgttcctgctaatccacttgcacttaatccatcagctagtgtattatctgtatttactaatactacattttcatatgtttgtttctgtgcaattttggcagctgtctcatatctatctttcccttgtatcttttctatgctcgaaagtgcattgatatttggtgctcctgccattattaatgatattgtcaatcctattgataatactctcttatttaccttcatcgaactcctcctactaatttttttatataattcagctaatcataaattacatcctcagtagtgattccctcaaaatctataaactactaaaacaaaaaacacctaaaataccatagcctgtaaagcaataacaaaacagattacaaaaagtactttagatgtgattttcattttataatatcagtaaattaacaaaaaaacaagatttatggaattttttacaaactaccttcattgccatttaaaaactcctgagtagcatgcacttgaccatcagataatatataaagcccaaatccagtactatagaactcatcactaagcatgtttgcattgtactctggagacttcttccacacttcaaatatagcctttgccaagttttttgcatcttgtgtcgtttgaacgttcttagaatctatataaatatatgctatattttcctcacttctcattccaaactcagaaaatacttgtggagcattttttccatctatataatgtgcaaatacttttttatccatcatatacttagaccatgcatttgccataccttctagcctactagatactaccaaaggctctttgcctttttcttttctataggaattgattaagttatacatttcagtagataccatttttttaaattctgggctgttgtaatcataggatttatcatccaacacttttatttctactctttttcctgtactttttccccattcgtctgtagcttttaatgtcaatatgtatgtacctactctatttgtatctataaacccatcaacttctattggtaataccttcccagtgttatctttagccactatgtttaacttgccagtgtcaaacttttcacccttatatatctctgtacttccaactgtaattgttggtggttgtccatttgactttgaagcatttatacactgttgtattaccttctcatttatttcacctacagaagttatattcttagctccttctaatacagttttatcgcttccatcatttactagtaccattggagagtttttagtaagtggtgcagctgctattgcatctactaattggtatccatctgatacatagaatccatctgcactattaaaaaagtagtctattacatttttgttagtttcaaatcggtcagttccttctattcttactgagtttgtatttttaactagagggttactcattatctcctctgaacctatacaatatgattgaatattttttacatcaaaaggcacactctttccatctgtaagtatgattggagctccatctctagtagctactgatgatacactcattgcgtctgcttctccactatatgcgttagttaatagtactttatccactttttttatagttgctatttctttagctattaaatagcttgtttttagtctatcttctccaccaattcttttgacttctatatttttagaatctagttctttttctactgatttacttatagtatcttctgtacctattatatatgcttttttgatattttttagacatctatttgtgtctgctggtatcttattttgttgtgtaaatagtattggagcttttgtagctcccgataatccacttgcacttaatccatctgcaagtgatttttctgtatttactaaaattactgtttcataagtctgtctatcagctatctttgctgctgtttcatatctatctttaccgtatattttttctactactgatgatgcatttacacttttgaagtttactaagattaatgatactgctagacctaatgataatatttttttgttcattttcatatccccctgatgatttttatattttatatttatattgtgattattttctatttattttctctttattttccatatattatagagtatatatgatatgaatatatctcgtctatatattagtgttttattttattaaatttaaaaaattatttttaacttctttttaaacatattcaaaattgaatttatatttatatatataaaagatatctgctttatttaaaattaaacttaatatagctcaaattattatacattttaacctcaatattattaaattgttaagataatgaaaataaaataagaatgcatctaaatatataactttatatctaaatacattcttattttcgatttacttaatatttatttttcaattaaactcttaatcttatctactacagatgaggctattcctccacctacttcaaacaactttgatgaatttttaccttttaatgatgattcttgtgatttatctaacgtatttgtagcaagtataactggtgaattgtttttagctgctaatggtccaactgctaaagcatctataagtttatcttgatttgcaactacaactccatctagtttagattgagagtagaatttatctattactttggcattcgtctcttgtctagtttgacctgccaccctattgtttgatatatctttgtttgctatttttccaacttgttcaatagccttgttagatattttttctattccaccaataaagtatatatttgacaccttatttgatttaataaattgtacagcttcattatctacaccatctttttgtgtaagtactattggagttttttctttaccggccagtgatgctattgataatgaatctgcttctccatttcctgcccctatatacaatttgcttacattattcgtcttatctatttcttttgctatattaatagaagtttgatatcttgtatctccacctattctctgtactgatatttttgaatttacagctttgatagcttcaacaactgaatttggcattgagttgtttccacctatcacaattacttttgatggatttagccttttcaattcttctacagttttttgaggaagcttttcatttgatgataaaagaatcggtgagttttttacactagcaagtggtgtagctgtaagcccatccaccatgcttttatcttctccatttactattacaactgtatctgattttgtccaaccactttgagatattttggtagctgtctcaaatctatcagcaccttttaattttttgactgtgacattagatgtagaattacttgaacttcctcctccagaacttccaccactagacgagccgcctgaattacttccaccaccattatttccaccattgccattatctggtggtaattcatccggttttgataattcattttcaactatgtattctaaactttttggaagtgtaacttcaacatatttatttattgtagcttttcttcccttagttattttttgtgctaatccaagttttaatattacatttgaaccactttcttgtgtttctttactaacaatagaatagtttatcctaatattgtttaataaatattcaagtgcttcacttttctctaccttatacttctcagggtcatttttactagaaccagttccaccaattggttttacttcactctcattaataagggtaaatattaatccttcatcagagtttatattttcataatccactgttttgttgttatatgttacaatttttaaagctggtttatcgcttgttccttttcctaaaactttatagtcagcatttgagttactgccagatttttttacagatattcttcctatattcaatctatttccgtctagtaaatcttcatttgatgtaacatatatatctaatgtagttgtattacttgatttgttgtattctactctacaagtagcatttgcatttccactttttatctgagattttatattatcagaccaagtaatcttttctttctgctcattatctactacttcaacctcaccttgtacttttatactggcttgaaatgaatatactatgttttctactgagtccacagatatatctatagtatttactttctcatacgtttttgttccttgtaaaactggagctgcatatgcacatgtaacactaccagttacagctactgccatagttgatactgctatagttcttataaaagattttcttttactcattaacacccgtccttatctatcattaactaagtggataaatttacttatccacctagcttttatatttaatttataaattaccctaaacttatagttacatttatatactttgcttttaatatctactattttaaaactattctagtacctaatcatattagatatacaatgttagtattagtatttttacgtttttagagttccacctactatttatctctaacaatattaccctttactttattgcttacagttataaccttcttattactgacatcaatagcatttcttgtagcttttctagctttactattactatcagtaagacttattgtctttaactcatcataattcttagctcctacaggtacatacattgtatcacttacaaatctttgacctactggcgtatctccttgaaggtcattgtatctatatagttcagccttaaccttatcacttaaagaatcaaagttttcttttggcatatagtaaacccatgtacctttactgatttcacctaattcacctttttctggaacttctgcaaataaaagtgcttctccagatatagtcttattgtttttatctataagtagtggtaaattaaatgctggatttccactgtattcacctgtaataattattgaacctgctggaatcttacctgtttcatcttcacttgtgctagggtcatcactttgatatacataatcttctgctaactttccaattccattagtacgagtttggtctgcattattcattgtgccaatttctatattatcacctggaggtcctattatatctaattctgcaacttctatattagacttattgtttgagattagttttacatatctagcttggtatgtccaaagtttatcatctttattaaatgtaactctagcttcattatcttggtcttttcctccaccaactaaatcttgtccatattcaaaagttccttgacttacatcttcccagttctttttatcattacttacttgtatcttgtaattagttaaaggattgtatgttgtgctagtattctttctaaagttaaataatccttttaatgagaacttcctagtttctgcctctggttttgtatattttagtcctactataggtaatgtttctttcatgtctactattatatatggattttcttctacatttatatcagggtctttttgagggtctttgttccactctgctttacttattatctttcctttatatgtagtacttacatcattatcttttatattatcaatttcaggattttgtaatggtccatgtgagtcattttcagttctaacatcaccgtcagaaacagtatttgttatgaatgaccatgctgatttatttattttcccttcatctgataattttacagtgccaacttcaaattcttctgttggatttaggtgataatcatatgcaactaccttatatgtaaatgctctgttattaagaggagatatactatcagtaaatttggccttactatttccttttgcatccacaaatccaactgttctgtattttacctgtgttccattttcaccatctaaataatttccatcacttcttattatttcgtatcctagtatcttatctttatccttatctacatctaggtctatagatattttattagatttaactagagaaccactttgtattccatcagaaaaactagcacttactttagtatcttttgccatactagctatattttcatttaaaatctttcttctagcttcgtcatttacatattgtatctttcttgattctttttcatagttcttactatccattatactgtttaattctggtgtaatttctactccccatgccttaaagtaatctcttaaatctttttcaacaacacttgatgccattgctactagcatttggtcttttggtaaactattaattgggtcactacttgaaagtgctctgtattttcttgaaatctttgcatagaatgtatcattacttaaatcagcatctgagttattctttaacattgaacccgtaaaatcatcatcataagctagatgtaattgccataacattccaagcctttcaaatacattgcttggtatacctaagctatttgaagttacatgctcatatatcttatccattgttgaaccttcaagtcttgaatgtgtcttatcatcaaaggtctgagcaagtaaagcaagtacattgttactagtttcgctatatgtcatctttccaatatctgtaacatgtcctatttcatgacctattccccatccaaataagtttcctcctgtagcttttccactatcatctatttggaaaggtactccattcataagccctggaactgaaccatattctactcctacatgtaatccagaagcatacataaatgctccaataaacattctttggtattttatgttcatacgagattttggagccatatcatttttagttaagttaaattcattatcatctacagttccattaccatctaaatcttgtgttttaaatactcctctttctgagtaaactaaatccattatttgttcccatgcaagcatactattatataatctatctacttgtgtatttaaatcagcatttccttttgatattccttgatatacagctgttgcaggaacatttaatgttactttatcactttcaatatctgtagtgtttaacacaccagttttttctgaatattcatatgaattaccaatatttgttcctggataatatggttctccttttacagcatctttatatttagctaattcttctatatatgcttttatctttttcttagattcagaaactcccgcaggactcttatcatttattgttccatttagattaagatgtggtatcttagtagctcctgctacacgtacttttatatctcctccacttggagtatcttcagggtatcttatgtataaacttcctccacattctatatctaaactatgaagtttgcttaattgaattacattttttccagttttaagatttatttctccactcttatatgcaccagattctccatagtactgtgtatatatcaacttaggagtttttccacttttacttccaacatatactgttatttcatctcctgctctagcagctactcctaatgcctgccagtcattttgcatgcctaagttattggaatttacagtatactgtccgtttttatctttatattttcctgatttatttatttcttgatttacagtagttacatcagtaagtgtggctctatcattatataagtcttgagctaattttaattctctatcaataactgtcttatatggatgatattctccactagctttatctggagtatttaatctatcttttaattcagttattttttcttgagttacatcttcttttaattcaacttgtaggtcatccataaatagatttcttacatcatcttctatactgtcatactcataaaacttaagttctgatatattagacttatatgaataagatgaacaaacacttacttgtatcttagtagcagttattggttcttttaatctaaccattacatacttattattatttacagggtctgtctttgtttcaaaaggaacatcccccagattgtgtaattgaccattttcatcccaatatcgtatctcaaagtcatttattgtcttatcagaaacatcaaaacgaggtgtagccataaaagtatccatagtataagatttatcaaaagttattattggtcctctattcgttccctcagctgcattatatgttgggaatgtccaatgtgttgtgaagtctccatctactacattgaatttatcaaatggatttttatcactatattcacttttgtcatatcctgctggataaacaacatctacaatgtgatttgttggtattccaaatccaccattctccttaggagtattaattaatctatagttaggtgttgttggtgcatctatgctttcagttgtacctatatatgttttagacattccactagttcccaagtggttagtagctgtcattctaacttcatatgttgtgttatccttaagaccttctatttttaaacttgtcccacgaataagcttatcattgtattttatccaagacccattagagcctttttctttatagtacaagtcaaagtctttagcttgtttatgatttttccagcttacatcaagagatttaaatttacctttaacatttataccttctggtggttctggttttgtgtctggaacaacttgaaattctaatatgctatctgggctaaattgtataggtttatagtttgagtctacattttctggtactccatctaagttttctggcgttgcatctttataaccactagaccaatctccatttaaagattgtatgctaaccctatatagtccatatgcttctatatctctaacttctattgtatttttactagtttgtaattttttagtagataatacttttcccttactatcaattttatctagtataagttcgtatgctgatacatttacttcattattccaataaaaagatactttttcatttccaacagcagtgctagtcgatattttatttattttaggtatgttcatctctggctttggtatttctttatatacattgtttaaaaattcaacttttgatatttctgcaagatttctatcgtttgctgttgtagctgttatttttatagttatcttttttactgctacttgtttaccaagatttattactatatcgctattttgaacatctgtatatgtttctaatgctgccctactatatgtagatgttgtagagttatcatctttactgatattatccccttcttttggagtatcttcatctgaattaggtttatccattgatgaattttctttatcattatttttatcttgattggtattagagtttacttcttgtttatcgctattttcctgttgtttatcattattttcatctttattatttgaattattatcagtctgatttttattttcatctttattatttacttcttcttgatttacttcttcttgttcgttatttacttcctcttgttgctccttatcttttaagtttttcatatattctttattttcataaggaatctgttgaacattaccatcttcgtcagtaacctcaactattccttttgctggagcagtaccttctggagcttttatattgatgacttccatattaagtgcttctgataaagctatatccattactgctggtttttcctcagatatttcatcattttttgaagatattgtaactccattattttctccactaaataaattttctacattaccattaatatctacatcactatttccttttaattcaaccttacttgtatctactataggattggtagatactatactttctaggctttttgcatcttcactttgtcctaaatttttctgtacataatctaagtcaacaatatctacctttccatctctatttaaatcaaattctcttttatttgaatctatattctctaaaaccttattataatcactcttatctactttaccgtctccatttacatcacccattaagaataattcataatttaaaggtttatttttattatctacacttgctctattgcttaataagactctttgtgaataacttgatatatcaatgtctttaatttctttgttcttaaatccagctccagagacttctatattgtattttccaacaggtaaattattaaatacaatattataatatgatacattctcatctttattttttatttcacttctacttgcagataatttttttatagtatattctatattatctgtcccaatatttactgttcctgaatctttttctccaagctttattattccactattgttactatcatcttttaatcgtaactgcatattagtcatactttctgactcgctattttttattggcagtgaaaaatttaaatctacttcaagattcccccttaacttttctgtaactgatttttcaactgcccttagcttcccctctaatataggttctgcaaaaacatttagtggtgcactacacatagatactgctagtacacaagatattgcctttttcatgaaacaacaatcctcccttaataaatctctaatttttcatgaatttaaatactataagtttcagacaataaaaaaagacactcaaagagaatcttaattataaaataaaaagactttactctttttagcaactggctgatatggctttaaaagctttaatccctatagttttgcgtcattagatttccctaattttgccatttaattttcactactttcttacccattttatactatatttaaactttttaatacaatttttttacattaaattataaaaaaataacatttatattaataaattaatataaatgttattttccattataatttaattatttatatagcttccttacaagcataattttgtgtatattttcttattctttatatcttccataaaattcatgtgtagcatatagattcttatctcctgttatagctataccaaatcccattatttcataccctttatgcaacatattagttccttcttctggatttgtcttccactcattaaaaataaagtttcctatatcatctgcatctctatttgtatatacaggtttatctgaaattttatatttaattatattttcaccttgaactgctatatatccaggtttaatctcactccaatctaagtatttcaaaaaagtagaatatgaattttttccatttatcgtatgagataaagtcttcttatttgccattaaattagaccaatcatttgctagaccctctaatctgcttgctacagataacgctcttactccattatcttttctatactgctttgtaagagcatatactttaccctttattctctctttaaatgctctatcatttggattgtaatataacccttgttgatttggtgaagcttgatttatacattgcttgataacattctgatttatgcctcctagtacagtcaatttgtctgcaccacttaaaatactcttgttactgccattttcaactaaaactacaggagcattttttgctattgtagaggcgaccaaagcgtctgttaattgcaagcctttacttagataaaattctttactatttttataaaactcttgtataactatcttattagtttcaaatctatctgtgccacccaatctaatagaatttgtgctcttaactaattcgtcgctgattatttcactagaaccaagcgcataactctttaagcctgtcgtgtcaaatcccacactatttccatctataagtattataggtactccatctctagcagctactggtgatgcacttatcgcatctgcttctcctgtaaatccattggctataattactttatctattggcttaatttctttgattttttcagctatttttatacttgtatcaaatctattttcaccaaatattctttgtacaaccttctttttggataataactgattctcaacatttttacttattgttgattctgagcctattatatacacagtctttgctttgtttaatctttccatagttgtgtttggaatctgattttgctttgtcattaaaataggcgcatttaaggctccagctaaaccacttgcacttagaccatctgctaagctattatctgagttgattagtattgctgtattgtagttttgcttatctgctatttttgctgctgtctcatatctgtcattcccttttatttgctcaactgatgtcaacgcatttaccataggagtatttaccattactaaaaatagtgtaagtcctatagctaatatctttttactattcttcatattattttctacccccaatgtacttttcatattttttattagtactcatacttatttttaatcaaaagttacaattttgttaccatattttatatatgataccatagttatccatacaactcaaacaatatacctaaagtttttattctctataaattcaaaacattataatttattttatttaattaagttataagttcaaaataatttatgttagtaatatgtttaatcattataagaagtatctttttataataatttttgcaatatgaatttctccacattataatcaaaaaataaaataaggtatctcaatctaattctaaatgagacaccttatttttattattttatcttgttatttgtatattttataatatctacactatgtcttacatattaacgcattgtataatcatatattatctaaataaacttttaatattaattcctatatcttattagttcttagtaaataagtttattttttctgctattttttcaatagcgtttttagctattccttcacctatttgtactaacttagtagcattcttaagtcttaactcaactacttcttcttgtgatttagaaagttcttctgtagttaatactattggagcctttgaactagctgcaagtggtgctgctgtaagtgcatcaactaattgtccatttccacctacataaccatcttttgctacatatgctttagttgcacctgcatagtatttattgattactttagcattagtatcttttctattttctccagctaatctttcaactttattatttaaatctatatcaactaatttgtcttcaacttcttttgatacagaattttctccacccactatttctaattcttttccttttaataatttttcagcatttgcatctaattcgttacctgtaactattattggagcaccaaattgagcagctctagctgatatactcatagcatcagcttctccatttccacctactacaaaagcagtcttaaatgtatcttttaattgttttgctatttctaaagaagtttcaaatctatcttctccagaaactctctcaactttacttacacctaatttagaaagtttttcttcagtttcttttgatactttagattctccacctactatatatattttcttagaagatagattacttccaagtactcttaatatttcagcttctatttctgatggtagtgaatcttttttagataataatattggtgcatttttttgagaggcaagtggtgctgatgctaatccatcaactatagcatcttctccaactaaaattatagcttctgcttctccatctttgaatctctctttactaacttctactgctgttgtaaatcttgaatcaccagataaaacctctacttttaattcttttccatcttttacatcagttaatactttgtgtaagtctctaactaacttatggtttttacttgaaacacttattgtttctgacttttcatttgccttgcttaaaactatatcaaagcttgatttttctggtttatctttatcatcactatcttcttgttcttgagtaaggattgcttcattttcaaatgttaaagcatatccatttttaactttattaactatttctcttcctaatgtagttaatctaattccatcaaataattcttctgctgatatgtcttgtaaatctgcgtttttaactgttatcgtatgtaattcttttgaatctatgtcactataactcttttcataaccttcaaaagtaccttcttctgatgttatcacttttgagaaatctaaatgttggtctcctacatttaatgtaataacatttgctgaatcttttgctctttttacttcaactgtatttgtagattttatagttgctgttaacttgttatcagaatcttctgctaaagttgcattgtaagcattaactgcatctactatttcttgagcagttttgtagttttcaattttatagtcaactacttttccacctaacacttgatgtcctttatcttgaatagtaacttttaaactttgcccttctgttaaagagtttattttattttgtaattgagttgcattagttaagtttacattgtctacttttatatcgtaaactctatcatttacatttgctcctgcttttgtatcttcaaacttaacttctaatgcttttctaacctcttcgattagtttagcagaatctttcgcacttactgtgtaatttttatcaacattttctgtcacagtattgtctgcgaatattggtgctgctgcactcataactgtagcacctgccattactattgccatacttctctttttgttgcttaacatatttatgtcctccgaatattattttttattttttatattcgtatttcccacacataaataatattatatataatattatttttcaatatattttatgtgtttacataatttactaacacaaacactaataatatcttcttgaaccccttccccctacttagctctctataattatgctcaaagatagaaatccctattttatagtgattttctactaaacaatcatatactaacaaaagtattcaaactccatttttatatactactatgcactaatttttgctttgctcttattacttaaatatatatcactaaattaatatctacctccatatattaaaatatataacatattataaaatcatcataaattagagtttaaaattaaaaattattctaatacatgtaattgataaaaaataaaatataagagtagctactttaaaataaatgctcttatatgattagatatttttgcataattaaacgataagaaatcaaatttaattttacataagtagaatatatatttttatataataattgaaaataaaagaggatacctcataatgataaaagaatcactttgagataccctcttacaaacaactaaatcaataattttctatctttcacactcttgatttgcaactgtacaagaagttttacaagctgattgacaagaagtttgacactctccacatccaccttttgcagcactttgctttaaagtagcttgagataaagtttttacatgtttattttccattttcaacgcctccatttctaattgtttcctattgattatatcataaaactactttaatataaactctatttaaagttgacacccaatacgcctccaatgcctcctgctgctgatattagcaataacttataaatcatccctacttcaaatacaaacttttcttgtgctaaaaacacagtcaaaaaaatacatactatgtacaaaagtcctactaaaagtccatacataagtcctttttctttcatgtgttttgaagtgtaaaaccctcctatagctgcagaaatagtagttataaatgatgagaccatagttatattatctccaccaatatctgtaaatgtcaaaaataagttatacactaataaaacagccaaagttattatatatgcatatcctagacctttaaaaatataattagattttcccataaaaaaacctcctctcaaattaatatatattcgagaaaaggcttttaaattactaatttagtcttcttctatttcttcttttttagatttaacagttcctatagcccatttttcaaatggaactttagttctatttggtcctaattctaatattacaacatcatcttcaactttagctacattagctactattccacctattgtaatgaccttgtctcctacacttaggctacttctcatttcttttaattgtttgtcttttttcttttgaggtctaatcattaggaaataaaagattgcgattactactacccatagacctatactcataattatttgttgctgtggcattaatttttcactcctttgtaaattatactcttttgtaaatcataataaatgtttatataacaatttactttctctatctttgagtactattgaatattatatattaaaatgattataattaatagtgcaaaacctatatttcatatccatattttgcaaaaaattcatttctaaaatcaagtaatctatcttccattatcgcttgtcttatttgtttcattaaatttaataaaaagtgaagattatgagtagttattaatcttgcacccagtatttcatttgcttttataaggtgtcttatataagctcttgaatagtttttacaagcataacaatcacattcagggtcaagtggagtaaagtcttcagcataagttgcatttctaactactactttaccttggctagtcattgcagttccatttctagcgatacgagtaggtaggacacaatcaaacatgtctactcctcttataacaccttccactaagtcatctggactaccaactcccattaggtatcttggtttatcctgtggcataagtggagttgtatgctctagcacgtcatacataagtggttttggttctccaacactaagcccaccaatagcatatcctggtaaatcaatactagttatttcttttgctgattgttctcttaagtctttatacatcccaccttgtattataccaaataaagcttgtttgtcggtattattatgggcatctttacatctttttaaccatcttgttgttctttctaaagaattttttacatattctctatctgatgggtatggtgcacactcatcaaacgccatcattatgtctgaacccaatgcattttgtatttccatagctttttctggagttagaaaatgttttgaaccatctaagtgtgacctaaattctacaccttcttcttttatctttcttaaaggccctaagctaaatacttggaaccctccactatctgtaagtattggtttatcccagttcataaacttatgaagaccaccagctctttttataagttcatgacctggtctcatatataaatggtatgtgttactaagtattatttgtgaaccaatctcttttaattcttctggtgtcatagattttacagttgcttgagttccaactggcatgaatattggtgtttcaataatcccatgtggagtgtgtaatcttcctaaccttgcaccactctgcttacaagtctttatcaattcatatcttactgcgtacataaagttctccttaaccatatttatttctcattatttcttaagatatatttgtaataagctattcatataatttattgtctaaatagatttatcttcgtcttctttgttctgttgctccttaattgcttcttcatcatgaatactcattatattaagagcactcttgtcttttgttactaaaaacttttttatagcaaatagtcctgctatagctataactcctattaaaacatctatcataccttcatttttaggcagtagcaacatttttctagctattgcgtaaagtaatgcctcaataaatgctcctggtatatgaagagatagcattactacaagttcaacacctattactaaaagtaatatttgtgctaaaaaatcattaagctgactgtattgtactggattttgaaaatcaactatatatgctccccacataagtcttagaacatctatagttcctaaaaatactgctattagaactactactgctaaaacacgttcaaatataaaagcaatctttaatatagggttattctttttttgtttttgtaaactatgcattcattacctccctactttataatcatagcatctccaaaactgaagaatctatatctttcttttactgcctcattatatgcatttaaaacattatcctttccacaaatagcacttactaacattattagtgtagattctggtaaatgaaaattagtaataagtttatctaaaactttaaatttataacctggatatataaatatttctgtccatccactagtttctttcatctttccatcctcattacaagctgattctatagttctacaactagtagtaccaacacatattacattgtttccattttccttcgctctatttattttgtcagctgcttcttggctaaccatataatattctgaatgcatcttgtgatttaaaacatcttctacttttactggtctaaaagtgcctaaaccaacgtgtagagttacaaaagctatatctacacctttttcttttattttatttaacaattcttctgtaaaatgtaatcctgctgtaggtgctgctgctgaaccattatgctttgaataaacagtctggtatctttctttttcatctagtctagcagtgatatatggaggtagtggcatatttccaagttcatccaatatttcttcaaaaattccatcataaaggaattttataattcttgaaccttcatctgataaatctacaacttctccaattagctttccatttccaaaagaaaatttagtccctacttttgctctttttcctggttttactaaagcctgccaagtatcttcctctgttctttttaataataaaaactctattttacctccagtttcaagcttctctcctattaatctagctggtataactctagtattatttaatactaaacaatctcctggatttaaatattctattatatctctaaatactttatgttcaatattacctgtctctttatctaataccatcaatcttgagctagctctatcttctataggaacttgagctataagttcctgtggtaagtcaaatttaaaatcacttgttttcaatgttaaacttcctctcttaaaatttctccagctacaataatatcaaaaaaacaacttattttccacaatattaccataatctatcaagaaattgctatttttaacagacaccatatccacaatatatagatatttttccacgatatacatgtcttatccacaatatatagatacaatacacacaatttttatcgtgtttatccacagtatctacagatataattaccattttgtggatatatttgaatttttagccattttagaaatattttaatttaatgactcttttattttataaatactcgtataatctatttttatttttcattaggatatggaatttttaagtgttcatatgctaatggcatggctactcttcctctaggacctctatttataaatcctaattgaagcaaatatggctcatatacatcttctattgtatttctatcttctccaatagaagctgccaatgtatctaaacccactggtcctcctctaaatttttctattatagtcataagaagcttctcatctacaaaatcgagacccaaactatcgactcctaaaagttccagagcatcttttgccaccttatcagttatttttccatcagctctgacttgtgcaaaatctctaactctttttagtaatctatttgctatccttggagtccctcttgaacgttttgcaagttctaatgctccattagactgtatctctgcatctaagatgcttgaagacctaagtactatttttgaaagttcatcaactgtataataatccaatttacaaataacaccaaatctatctctaagtggatttgtaagcataccagctcttgtagtagctccaataagtgtaaatttaggaaggtcaagtcttatgcttctagcagatggccctttccctattattatatctaggcaaaaatcctccattgctggatataaaacttcttcaacacttctattgattctatgaatctcatctataaataaaacatcattttcatttaaattcgtaagtatggctgccaaatctccagctctttctattgcgggtcctgacgtaattcttaaatttacccccatctcatttgctattatacttgctagtgtagtttttccaagacctggtggtccatataaaagcacatggtctaactgctcatttctcgatttagctgcttctataaatatactaagttgttctttggatttttcttgacccaaataatcttctaaagtttttggtcttaaactgttttctatatctatatcttccatcttcattgtagaagttattatcctattttcatcttcaaaaccttgcatttatacccctcctctcgtacttttgaaaatctactttatatattttcaaatttacataaactccttaaatattgttttaaaatccaaatattataaaatccaaatactatttcaaggatttactcattatatatgtaagagctttctttataatagcttctgtattcataccatcttttttacatttttgaactgcctcttttgattccgacaaagtatagcctaaagctacaagtgcatctacagactcatcttgtgatatcaaggtaggtttttgtgataataacgttggttcaaactctatgttatttttgtctaccttatccttaagctctaagacgattctttctgctgtctttttaccaacaccaggagctttggataattttccaatgtcttcacttaaaatatatgctcctaactgtgctgatgatgcaaatgatagtattgaaagcgccaccttaggtcctattttagatacagatgttagtaattcaaacatcttaagttcttccctacttacaaaaccacaaagactcatatcatcttctcttacaattaatttagtatatatttttgtggcttctcccacttgtaaattcattattgtattggatgatacatttattttatatcctatcccattattttcaacaactatactgtctatataaatttcttctactgtaccttttatataactatacatacttaccacctatattctttagagttttttcaagtttgtttgaatgagcatggcaaatagccacagctaaagcatctgcaacatcatctggttttggaactttttttagacttaaaaatgaagttaccatctgttgaacttgtgccttatctgctctcccatatccaactacaccttgttttacttgaagtggagtgtattcatatacaggcttcccattatgagcacatgcaagcatagtaacacctctagcttgtgcaactgttatagctgtttttacattcttgttaaagaataattcttccattccaacttcatctatattgtaattctttactattgtatcaattcctttatacacaagttccaatcttctcgatatattcatatgggcaggtgttgtaactgctccataatcgattactttaaacttgctatttttgtattcaattataccatatccaactatggctatacctgggtcaatccccaatattatcattttttaaaattccccctaaaaataaaagaaataccaaaatgtatttctcataaaaacttatgttctaaatcattatatcataaataatattaacaaatcataaaatgctctatgtaaaatataaaatcaaataaaaaagttatatcaaagcaagattttacctcaatataacttttatatttattacaaataaattattgtatttttataggaattaaatgtgactacaattttaatactaatctatttaatattaaattatttattattaacttacttagtatttaacttgaaataatattaatttactattaacttgcaaagtcttctaatcttgaataggcctcttcttcagtatccataactacaccttttttgatttcatcttgaactgttttaggaagtgaatctactcttatttttgttttttctactaatgttttacttccactatcatcatatttatatagtgctatatttccattatcattttcaatagtatatttaccttttatagtagcgttcattgcttgtacatctttattatcactatatttagattctaccaatatgatttcatttttatccatactctttatttttttagttggatattcttttttaaaatatgatactatttctgattttgtcttatctaataatgactctggaactatcccagccattgtaagtgttctcttatagttagtttcattttcgccttcactttgaagccaaacttcacaatttttatttaatccaaaagcttcttttgacttttcgtccatattcgcactagcacttacaactttactagtttgaactccattattttttaatcttgtccctatataaactccgctacttaatacaaatactccaaccagtattaaggcagatattttccaaggaaataattcttttttcttcttttcaaacattgattacgcctcctttttctattattttctccaagctgtaagtttttatacaatttaggtaaattttagaagaaaatatatttatatttcaaattactctaagaatagatattttctaaaaggtagttttctcttaatggttatattcttgtaattatatggacataatttataataaataatcgtttaggaggtaataactttggaaagaataaactgtaatgtaattaactgttcacataacaacagccatatatgttatgcagataaaatttttataaatggtgaaaaagctcacaatgacagacatacttgttgtagttcatttttagatgaatctatttatagtaatttatctagcaacgttaataatagaaattgtgaggaattagtttgtactgtaaaaaattgtaaatacaacaaagatggtagcttatgtacacttgataatatattggttgctcctgaaactgatagagtaaacctttatattgaaacatgttgttctagtttcgaatgtaaatagtcatagtataaatataagggtgtcaaatgtaattaaactaacatagtgtagagtatctacaactattagtttgattatacttgacacccttatttattttaaataaaatttcattattataaccatgtttataatgttctaactgtaattaaatttgataaatttctataaattggtataatcaatatgtaaattgaatttagcaaattaatcataaaaataaaatatcgagtatatagtgttatactaactagaaatgaggtgcttatgagtacattttatattcaatttctttattttgtaatttatagctttataggatggtgttgtgaaactacatattgttcagttttacaaaaacaatttgtaaatagaggttttttaaatggtccattttgccctatatatggatttggagcattagcaatagttgctaccttgactccttttgtacacaatattcctttgttatttttgtttagtataattataactagcataatggagtattgtacgagctttattttagaaaaaatatttaatatgacttggtgggattattctaaacataaatttaatattcatggaagagtttgtctggaaaactcacttatgtttggtgtattatcattgattgtaatgcttatagtacatcctattgtggttgactttattaactctatctctaaaaatgtgctatttatatttgctatatctatagaaatttattttgttttagatttagttatcacagtccatacaattttacaattaaatggtaagttaaaacaaatcaatcttataattaaggaattaaaagataagaaagaatactacaaacttattacacaagaaactatagaaaacaaacttgaatctttagttgaaaatagactggatactttggaagatagatttgaaatacttaaggaaaaagaaaactatcgctatgctaaaaatcgtattgatgagctaaaaaataaacttaatactttgctgtctaaccacaaattacttcatagacgtataatcaaagcattccccaacataagctctaataagcatacagatattttaaataaaatcaaagaaaatattaaatcaattaaaaaagataaataataaaataaacacataagttaaataataaaaatactaatacataagattaaggtttagaatattttttgtaaaatactctaaaccctaattaatatactattatttttaatcttaatttataattttagtttattttacttttaacacagtaaatttaagcgtttaaacttcaatacactaatatactaccccatcaatatctcaactgattctctaagtgtgctaatctctcccacatttccagggaaaattatatatggcatattaggaaatttgctttctttgcctgtcatccatactggtataccaggttttatctgtcccattactgtagctttttttactcttagtgctttagtaccaacatcactagaagtaattccacccttagctataataaaatttggtcttacattaagcataccaattatactggtaactgcatctgatatttctacagaaatcataagctgtttatctttatcattcgtatccaagtcaaaacgctctcgtctagtataaacagcaacagttttaccactgcttattttttcctctacaacttttataactctttttacctcattttttagaccattttcctgaagaactaaatgttgattaaattctataaattctattggatatttacaatttttaagttcttctaactgttgggtagtcttattcacatgtgaaccaacaagtataattcctccattggtattaccttttgatactaactcatccttagtaagcatttccttatcactcactccgccaagtacttttgttatggcagcagcgcttctaaacataaattccttaccactatttactgctcgtataaacgcaattgtaaatacctttacatctacataatcggttgcatttacaataattttattgaatccttcagcttttttaagtttttctgttatagcttcaatatttagctctctaagttctttagaagaaatatatatcatatcactagatttgtactttccatgtgtcttttcttcacaccactcacctatatcagatgatttatatccaaaagatttatcctttgcaaattcagtcattcctgctggtacaagtatttctccttctttaacataatgtacattatctatagtaaacctaccaccttctttaaaaaatggcattattatttcaccctgaaataacttccccgataatctctctacttcgctttttaataaattagtttcaacaggataatgtcctctcatagtagaatcactacgacttatgattataaaatccttattaactttctttgatacatccacaatattctttgaaatttctttatgtgcttttgtagtttgagcaacagtaaatccccttgaattagtaagtataaaaaacatactatttttctcattaaaaccttgttccatactatccttatcccaatcagtataaacagaaatatcatgaactgtttgtacacctgttgggtcatcatctaatacaacaatttttctatctaaatgcttaagctcatctgcaagaagttcatttaatctgtcctcatctacttgtttaaaagtattaagtatatctatgctaattggttttacttctctcatttaaaacgcccctttatgtaatttgtatagtctaaatgtaatttatataatataaacaatagtttgttatttatagacctggaagtggtataattccatttataacactaagcaataaaaccattataaatgctacaactccagcaatggttcctccaattgtccaagagtttaaagtatctttaactgataatccactaaatcttgaaagtacccagaatccagaatcatttggaagggagaaaccaactcctccagcacatatagcaagccctactaaaactggtgacattccagttgccaaaattgtaggtcctaaaattgatgatgttgttactaaggctacagtagcagaaccttgagaaattctaagcaaagcacttaataagaatccaagcactacaactgatatactaagaccagacatagtatcaactaagaagttacctataccacttgcatttataacactgccaaacgcaccacctgaacctgttatcaataatattagccctgctgaatcagcagcttcaataactacatctcccataggtttatttatgtatctctttaaaaatcctattgccaccaatattccaagaagtattgctatgtttttatctcctataaatgcaagtactccactcattgtagaacctttttctaagaacatactaaatacatttgatataagtataagaagtattgggaacaataaagaaaacatagaaattccaaaacctggtactttagaagaatcatcatcttcaatttttatgctatcttttcccttttctaaatttttttctctatcattctcatcaatagcataagctggatatttttcaaaacgttttccataaatccatccacctataagaactgctggaaaagcaacaattatagaataaagtataaaactacctacatttgcatttacatttgctgcaactgctaaaggtcctggtgtaggtattacaagtgcatgacctactatagtcccaactcctaaggcacatacaaaaaccattagagatttcttagttactctcgaaacatacttaattataggcatcattataacaaaagctgcatccataaaaactggaattgaaattaaaaaacctgctgtagttactgctaaagcactgtttttttctccagtcttagctaacaacccctttgcaatagattctgttgctcttgattctgaaagaatatttccaaatattattccaagtccaattacaatacctatactacctaatgtatttccaaatccagtcgatattgtggttgatatttcatttataggcattctaaccataaagcctgtaattatagatgttatcagtaatgccaaaaacggatttactttaaatttaataatcgatacaagtaaaattcctatagatataacaaatgctatcaaaagtccatatcctgtaatcataatctttacccctttatcattctactttattatttatcaattttatttttcttttactatgataacttaacctcgctgtatttatataatctaatcctaataatatgtatttaattatattgatatatttaaatattaattattgtgtttttttatttcaacacctgccaacttttcaaaatactgtgctattccactatggtcatcttccaaatgtccatgtacttttaatgtctgcataatttctaataattgacttgtcataggtagcggtacatctaaattgtgtgctgtttgcattacattcttaatatctttcaaattaatagatatttttccacctggtttaaaatcacgattcataatcattggtatcttcgcatccaatattgtactaccagctaggcctcctcttattgccttatatactttttctgggtctgcacctgcttttgctgcaagtacaaatgcctcagaaactgctgctatcgtcaaattaactattacttggtttgtaagttttgtaacacttccactaccattatctccaattaaaatagatgagcttcccattatattaaaaaatggctctactttcttataaatttcttccttaccaccagccataaaagcaagtgtaccatcaatcgcttttggctcccctccacttactggtgagtctataaattctaagcccatatcttttaatttatttgcacacaatattgattctgtaggagtaactgaactcatatcgactactatacttccttcttttaaagtttttgccaatccatccatcccaaataatatatcctgaacaatagttccatttggaaggattgtaaatacaatatcacattcttgacccatttctaaaacacttgcgtattttgctccacatgatataagttcatccacagcagatttattaatgtcatacaccaaaagattacatccatcttttaataaattttttgccattggctttcccattattcctaatccaataaatcccaatttcattttataaccctccatatcttcacatttttgaaaacgttttttatgttttagagtatactacataccagtataccggtcaatataaaatataaaagtatttattttaacaataaatagtaatttttaaagtcatttattatatttagtcatcctatataagttttaatacatactattgtttttaaatataatatgctacttttacagttttgtatttttactaatttcaattagttttaattaatctgcctttaatgttaatcatacttcacacttcaataattttttatattttttaatcttatctgcaatttaaattgcaaaagattgaccttattttcactatgttgtatgcttaaaattatataagtttttgtatttttatattgtttaggggggtattattaagtatggctacatttaaaagattacaagaacaagcatatgactacttaaaagaattgatactatctggagaaatgatagaaaatgaaatatattctgaaacaaaacttgctagtgaaataggtatctctagaacacctataagagatgctcttcaaagacttagtcaagatggatttatagatataatcccaagcaaaggatttagaatccatcaaattacagcaaatgaaattgtagagatattccaaatacgctctgcaatagaagggttttgtacttttttaattacaagtcaatacaaagaagctagggcagtagaaactataagtaaattaaaacatcttttagataaacaaaaagatattttactaggtgataaaaatttaaactcatttgcagaatacgatacattatttcacacaactatagtttcatatgctcaaaatactgaatttgacaaaatgtttaacaactatatgtacagaataaaaaaattagctctcgattcattatcacatgaaggaaggcttgaaacaacattaaaagaacacacagatatttttaataatattgcaaatggatgtattgaagatgtttacaaaactactctcattcatatggaaactcctaaatacattaatttagaagatttttgtaacaataagtgattttagtattatactttcatttattaaaaatatatctacctcaaattaatttcctaatttataaaaaatattctataattatattgtaactaatactattctaaggagtgatttttttgaacgaaaatgttgtaactaatgaaactattgacaaagattatgctattgaagaagttcgtatggcatgcaaacattttggtgacttatatttttatttttccaaagtgttatttgaagagtttggtgaagataaaactatcgaaatactaagaaaagttttatttgaaaggtctgaagaaagagctattgctatgagagaaagagctcttgaaaatggagatgaattaattgcagacaatattattagcacaactgatgttccatttctaggatgggttcctgaatttaaagagttacattgcccttatggagcttcctggcttttaagatttgaggaaaacccttggtttaaaaaattcgcttctctttactgtgatgttacagatactactgtagctgaagtatttacaggagatacgtcccataaaataacaaaaaacattctatggggagataaaagttgtgaaagaatatatttccatgatgacaaggtatctgaaggtaaatatacttatggaaataaaaactgtaaataaataatttaaattttctatattcatatactatattttgtactttttcatataaatattataactagtcttttattttacttttgtttaacctaaagataatttacttttaatctatatgaattatcatataaataatcagaaagttatctttataaattatagttttagatttataatttataaaatatttatgttctttgtaaaattttttagaagcttctaatgttatgctataaaactatcttgagaagggctgattgaatgtttaataaaatatatgaaaagaaagaatttatagtttttcaagttaaaaaaggttatgtagtttataatactagaaagagttttgaagaaggtcatacacatttaaagcattttgaagcagcaaagacagctattgatttagcaataaataaaaagattcctagaagcaaagatggatattatctgactagtttaattcgcataagtgatgatggttattacattgataagttaagcgaattgttatatgttagagaacaaaaaggtaaaaaagaaaagtactgtaattctggttatcagatgtaacaagactagttgtgaattataagtaccaatcataaatacctttagtcttaaaatcaaagagtatcagtaaatctataaaaaaacaacttactgatactctttttaattatatgattaatatttgaatttgatacaaaattttatacaaaagtttatgttatctattctgattctttgtctgcaaattggctattataaagcttctcataaaatccacccttttccattaattcatcatgattcccctgctctataatacttccattattcataactaaaatcaagtcagcattgcgaattgtagaaagtctatgtgctataacaaaactagttctaccattcataagatttctcattgctttttgaagcataagttccagcctagtatcaacagaactagtagcttcatcaagtatcaatattgaagggtctgatataaaagctctagctatggttaaaagctgtttttcccctagagatatattagatgcttcttcatttaagaacatattgtatccatctggaagagtggttataaagtgatgaacatttgctacttttgctgcttgtataatttcttctttagtagctccaaatctaccatattctatattttcaaaaatggttccattaaataaccatgtatcttgaagcaccataccaaacattgaacgcaaatctttacgtttcatatctcttatatctactccatcaattttaatagcacctttctttacatcataaaacctcatcaataagtttattaatgttgttttacctgctccagtaggtccaacaatagctaccatctgaccactttttacttctgcatttaaatcttctattaaagttgaattttctccatatccaaaattaacatgctcaaatgtaacatttccttttacattttctatcttaactggattttcaacatcaggtatttcctcttcttcgtctaaaatttcaaatacacgttctatagctgcaaaagaagattgtattactgtagataactgagtcatttgtgaaagtggctgatttatctgccatatataacgcacaaatgcttgtaaatttcctactgttatccctccacttactgcatatatagaaccgacaactgccacagctgcaattccaaagtaagttactaatgaaaccataggattcatcatacttgatataaattgtgccttaaatccattttcacaaagttcttgatttacttttttaaattcttttatagaatcttcttctttaccatatagttttatttcattaaatccagtatacatttcttgtacttttccatttaattttccaagagcattttgttgcaatgaaaatctactttgagatttttttactacaaatttagatacaaaataactaattggaattataaaaagagctataagagccatatatatattaattgtaaacatcattgaaagtgccaaaattatgactaagattgagtttacaatttgcataaaactctgttgcaatgcatttgatattgtatctacatcatttgatatacgacttaatacatctccaaaactattactatcaaaataactaataggcaatcttcttattttattttcgacttcatttcttaaatctctcattgtgttttgaatagcattcgtaagtagaaaacttgaagtatacgtaaaaattgcattagcaaaatatatacatgctaaaatcaccaatatttttgttacataatcaaaatttacggaagcccctggtactccttttgcgatactaattacatctttagtcaattgtgttattatcaatccttcagttttaggtgcaagtgcattcatagtagctgctgaaattatacatataatagctataataaaggaaaatttatatttctttacaaatggaagaagtctaccaattgttttcttaaaacctttagactttttcattattctaattcctccttttttaactgagatgttgcaatttcatagtatatttcacagttttttaataattctttatgagttcccattccgacaacttgtccttcattgagtactataatcttatcagcatcaataatagaactaattctctgggcaacaatcaatacaattgcatcttttgtttccttcttcaatttagcacgaagtattgcatccgttttaaagtcaagtgcagaaaaactatcatcaaaaatgtatatttcaggtcttcttataatagcccttgcaatagaaagtctttgtttttgacctcctgatacatttgctccaccttcactaatcaattcatcaaactttctaggtttttttgatataaactcatatgcttgtgcaactcttgcggaatattctaattctgactctcctgccttatgtttcccaaatctaatattatttgctatgctaccagtaaaaagcagtgatttttgaggtatgaatcctatcttttttcttaaagcttttaaatcatattctcttatatctactccatttatcttaatgctaccctctgttacatcgtaaaatctaggtatcaagttaattagagtacttttcccactaccagtacttcctataaaagcgactgtttcacctgtttttgcagtaaatgaaatatccttaagtacagaagcttctccatctggataggtaaaagttacattatcaaattctatgatacccttattttcagtatccttaattccattttcaggattttttatcaatggttcttcatttaaaagttcttttattctatttgcagatacctctgctcttggatacataataaataccattgaaaaaagcataattgaaaacatggcatggaaaagatattccaaaaatgcaaccaactgtccaacttgaagctctccaatatttatcttctcacttgaaatccaaaatacagccaaaacagctatatttaatagtaaaaagaatgctggttgagtaattgacataagcttaaatagtttcttagaaacattagcataatatgtatttgttttttcaaatcgctctgtttcataatcatcatttccaaaagctctaattactcttattccagttaaattttctctcgatataaggtttaatttatctagtcctttttgttgttttgaagatattgcctgagatacttttgctattattgctactccaataattataaaaggtactgatatagccaatactatagaaagttccacacttgttctaattgtcattattatacttatgatgaacataactggagttaataaggcagtccttagtagtatattaacaaattgttgaatttgaaatgcatcattcgttgttcttgtaatcattgaagaaattccaaatttattgtattcagtatgtgaaaattcttgtgatttctcaaatatgtcatttcttatatctctggttacacttgttgataccttagcagaacaataacccaacaatatactacctacaacccctataatagaaataataacaatcactattcccatttgttttatgtaagctatattctgatttgcaataccattgtcaattattttagctattatagttggaatccccaactcgactaatgcaaaactaaatatagccagtatgtttaatactattaataacttataattctttaaataacttaaaattaatttcatatttttctcctttcttaatttttgagatagtgtaatcatgtaataatactaaatttataaatgcttaattttataaaaaaaggagaaaagagttaacgcactctcttctccagcatattctttttaatacaccctccgacaagtcgcttatatgttaacatatttgacaagtaatgtcaattcatatagctaaaagtcttttaaatgcttcatctcataacattgtaacaaattggcatgtaatttatttttgttttttactgtattccaattttacaagttctccaatattactaactttcttaaaattcaaattagtcttatctataccagacttaaatagtgaaatccctctccccaatattattggcaatatatatatataataatcatcaattaagttatctttcataaataattttactatatcgcctccaccaactatccaaatatcttttttatccttcttttttccaatttgctcaattaattttttaggttctaaattagtatactttacattctccagttgtcccattaattgtatttgagtatatatagcattccttacccttatagtaccattcatttgggcttaattcatttgcaatctgtacatatgtggaatttcccataatgatagtatcaattgtatcgtaaaaagtattataatcatcttcctgctcattcttaaattctgaagatatctcgtctaaaaaacttacactgccattctcttcagctatataaccatctaaacttgtggcaatataaagtactacttttctcatgtttactacctccaacatttatagtgtgattattctatgtaaacatcacttttttactcattcaataataccctattaataaatcctcaaactaatttaaataaactttgcataaaactaaaaatatattatataaataatttaaaatcacactaacttattgaaaattctaattattacaaataaatattgctctctgttaacgctagttttataatataattataagctattaatattataaagccgatattactaatataataattatagttaatttacttttgttgaaaggtggtaaataacatgaaaatttcagaagtcgctactccaaattttttgctagatttagaccagttagaaaagaatatagataaaattcaacaaatttgtacaaataataataaacaactttggcctatgcttaagacacataaaagtacttacatagcgagacttcaaaaaaatgcaggtgctagtggttttctagttggaacacttgatgaaggtgaagctctgataaaagcaggttttgaagatattatgttggcttatccttacatgggagaagtaaatataaatagaattgtgactatggcatcaaaaataaatttaatctgtgctacagataatatagaatgtgctaaggcttatagtgaagctttttctaaatcaaaaatagagtgcaagctacttattattgtagattgtggcttacaccgttttggggttgaaccagaaaaagtggttgaacttgctactgaaatttctaagctagaaaacatcaagattgttggtataagttcgcatccaggtcaagtgtacggttgtagttctccagaaggtgttccagatgtttgtgttcaagaagattcttctatggagaaagcatacaaagctctaactgataatggatttaatatagaaattgtcgcttctggtagtactccaacagttgaagctgaagctgcttctaaaactataactgctgtaagacctggaaactatgtatactatgatgctatacagataggtttaggttgtgctactgaagatatgtgtgctcttactgttgtgtgtactgtaatctcaaaaaatagcagtggatattatttaattgattgtggaagtaagtgccttggacttgataaaggtgcacatggaaatagtagtattgttggttatggtagggtatgtggacatccagaacttactattgattcactttcagaagaagttggaaaaattaaagtaaatggtgaaactgatataaaaattggtgatagaataagaattatacctaatcattcttgttccactgcaaacttgacgagtaatttattaggttttagaggagatacaatagaaaaagtcatagaagtagatattcgtgaaaattcaaaacaaatcatcctttaaaaatatatttattttgatattaacatcatgaaagtatatttttcttaaaattattgttaataactaatgttaatgttggataaataaaaaacataaattctagaaatataaatttaaaaaaagaggctgtctcaaaattggatatgtccctgtcaagtagacagacttaaaaaaggctatctttatgcggaatgagttcgatattcaatcggactcattccattttttaattgtattctttcattattataaaaataaatataatcatttattagactaatcatttcctttggatctgtagtatcaattaaatatattaattcagatttaaaatgactgaaaaaactttctataggagcattatcccagcagttgccccttcgggacatagattgtataataccattatctttaagccttttagagtaagatctacttgtatattgtgaaccttgatctgtatgtaaaatacaatctttagctaaattcatatttattagttgatttactgttttattaactaatttagtatccatttttgtacttatctcatatgccactatttcaccattaaataaatctttggctacattcatgtataagaattttttaccgataggtatgtatgttatatccatacaaattttttctaatggttgattagctctaaattcacgatttaatatattatcatatacctcatatgatttaaacttacgtctatatactttctttctaataatagatttaattcctagttctttcatcaacctatatactttcttatgattaatagggctatcaagtattttatttaaataagtacaaattctttttctaccgtaagttcctctatattttttatgtatttcaattatataatccttaataattctatctttgatacccctatcggaagattttttagaataacttagccatttatagtaaccgcttcttgacacacctatcaacttacacatactagaaatactatacttcctagacataagtttaattgttttaaatttatcgcttactttgacttgtccaatagggtacttaacttttttaaaaattcattctccatgcgtaagtacttcaattcttcttcaacagatttaaattttctattatcattttctagactaatatttttaaatctgcctctagtttcctcattaaatgcagttttacctttatttttataatcttttatccagttttgaacttgtgttttgcttcttatattcagcatctcagcaattttgtatgatgagtatccttcttttatatataaatttacagcttttagtttaagttctttgctatattttttatgttttttagacatagaaaaacccccttagagtatacgctttttagacttattataatagccttttatttaaatgtctactataaggggattatactaaaatagagataagcctctctttcattgttgaaattatgaaaatatacttgatttaataccaaaagagtatctcatgaactaaaaagttcattttgagatactctcttcttttttaattaatatacatattaattactatattagtttattactatatatcaattactattcattaattactattcatcaattcttatatatcatttataattaggttataattttatgttatttacattaatcccataacagtgagtaaaactcttactatcaacatccccactattgcatcaaatataggaactgccaacagtaacattctatacttagtactggcatttgctacaagcactattctggcataatgaccaactagagtacccattaacatacatggcataattaatatggttgcttgtggtgcagtgattagaccttgtgcaaataagtttgcagctgtagctgctcctgctgccttagcaaagaatgctgctatcaaaactacaacagattccccaggtagtccaaaaatacccattactggaccaaaaatatttcctaaaatatcaactaaaccagttaattgtaaaaactgcactattacataacccattatcatggctggtaatatctgttcaacacctatgtaaaaacctttttttgctccccccataaatatctcaacagcagttttcttaggtttactatttacaattgcatttccagtattttgttgactcatactacacagcctccttagccttattctttttatttcttacacctatgattaatctaactagattagcaccaagtattttacagaatatctctataaggattattggacctaatgccaataatgctattggtaaaagtggagcttgagtatttattgtgttcagtataacagctgaaccagcatattgatatgctacaaatatagttctttcatcatctgttatttccccactttcaaataattctttcgtcattattgaggctacatctgaactagtaaatgaagatacaaatgctattcctgctattccaggtataccaagcagaggtctaagtaatggattaaatatctttgatgctgctttcattcctcccatagattcaactacatctataagacctacagcaaaacagacagttggaatcaaagtcagagcaaataagaaaccatcttttgctcccgttcctcctttacccataaagtctacaccatctgcaatagtaccaaatgaacctgtcagattagcaaaatctaatgctttaaggaagccttgactatctttaaatactcctgaaaataatactatcaatacaaataaagataaataccctttccatgttaccttattatctccagctgttacatccatataaaatccccctttatacctcaaatttatctaagtttaaaataactgtagaaattaatttcaccctctcaaacatagaatctactactgcatattctcttgatgtgtggttccattctcctcttacaccaaatgaacagattgtaggaacgtttgcaatagttaaataacttgcatctgaactacctccaagtctcttagcatttaattctccaaatccattttctcttgacacttcatttacaaatgtatgaaatctcataacatcttctgtagtttcaaatggcatcatttcacttataaaattaacttctgtagaagttccttctatgtaagtttctttacatatctctctaacttgttctttaacattctccatttcttctactttttcaaatctaaggtctacttttatactacaatcttctggaatagaattttccactcttccacccttaatcacacttacacttactgtagttccaacatctaaattagtcaatttttgtatgcgtagtatcttattagccatttcttctatagcatttcttccaccttcaaaatcattacctgcatgtgtttctacaccttttacatgtatattacatcctattcttccttttctacctatacataaactattatctactaatccagtttccatattaaaagcacaaagagcaccttttgcttccctcaatataacatctgcaccagttgaatctttatgacctatctcttcatctccagaaaatactatttttattggtctttctttgtatcctattttatttaaagctttaataacgtataaagagattattataccccccttcatatctaaaacacctgggccatatgcttttccttctattattttaaatggattctctccaaatgtacctgtttcaaagacagtatccatgtgtcctgaaaaaattatcggctttttatctatattagaaccaagtgtacctatcaatgtattaccattttccccaacatctactagttcacaatccaaaccttctttttcaaattcaagctttaatctctcagctaacttgtttacactttctttacaatgtgtataactttctatattaacaatctctttccataatgaaactatttcttctctattctcatcaacaaacttagaaatttcatttaaatatgtattcataatcttctcctttattttcaaataaaatgtatttctttcctaaaatctaagtttattttaggaaatcttaaaagactagtccttaattacaaaatagcacaattattcttgccagtcaacatatttttcagtcttttttatattttctgatttttctttcaattatccttttgtaaaataaattgacgcgttttatctactattataaaatgaggttataaattgattgattagttacaatactctcgaaattttaaaggaggttttatgaaatataaaattggttttttgacaacatcttattttatgtcagataagtttaaacaagctcttaaagaattaaatgatacttgtgaaattacatttattgagcttaaaggggagaatccttttaataatttacctaatatatactatgagcaagtagataattttgatggatttgtatgcagtggtatagttccatatagtgaacttataataaatataaaagacataaaagttccattaaattttttaaagcttgatgaaagagatttttataaatacttattcaaattattaaatagccaaaaagatattgactttacaaaatcatttatggattttttaagagaggacaacaattattatgatatatattcattaatagactctaataaatgtccatatacaattaaagattttaatatccctcaacctgtatatgactttaaaaaattaaatgataaattattggaaatacatttagacttattgcgagataataagattaacctttcttttactagaaattacatcattagttgtgaacttaataagcttggatatgattgtatttacatggttccatctacagaatcaatcctgaatacatttaaatctctggtgaatgaaataacattacaaaacttagacaaaaataaatctgcaacttgtatagttacagtaaatagttcagagtacataaatgaagatttgatatttaaaaatgatgagatacaaaatcaaatatataacactatattaaattctctatcaagacatggattctatggagttcaggtcaaaaaaaatgatatgaaaatagagatacacactactaaagaaatattaaacaatatgaccaataactatacagatttttttatttcagaagatttaaaagaaattaaatatagcttaaatataggttggggcattggaaatacaaatattcatgcagagcaaaatgctcgtcaggctaatggtaaatctgcttctttgaatggaaactgtacttttatagtaaatgatactaatgatacaataggccctttatattcaaataaaaattctaataatattgaagatagctcaatagccaataaagttgcttcttttatacctctatctaatacaaatgtatctaaaatcatgtgtatgattaatgatagaaattcaaataatgtgtcagcagaaatattagcagactatatgaacataactcttagaagtgctaatagaatattgagtatcttatataaagcaggaattgcaactattgtaaatacaaaactcgataatcaaagaggaaggccaaaaaaaatatataaagttgatttcttatcttttctaaataagatgcagaaattaaattcttaatatttaattttttaataaaagcaatgtattttctctaattttaaagaatcaaaatgtttaaattttattagaatatacaactttttactttaaaatacctaaaccttttatcagtgaaataaaccataatatatcgtagcttattagaaaaacaaaataatttcatatacaaataataaaatagccactacaatccataatttgcagtggctactttttacactatcacttattacttaatttttaaaaattaattgtattttttaaataatttatacacacctattatcagtaaaacaataaatacaagtatatctataaaaataattattgtaacatgtctggcaatattgtaaataaaaagtatagagaatatttctatagacaacgctacaaaacacataaaattcgttaaataatctgcaatagtatcactataaaaagcatgtatttgtaaccatctccatataaatggacgtaaaaggattctgaatacaacacaaatgacagggtaggcataaataaattttttatctacataattagctacaccattattccattggataggaatttgaggtggcaactttggaaatactgttattgcaatcaacaaacaagcaatagtaataattccccaggtaattttccctccccatatatataagaaacttacagagtcaagtttaaaaacaggtttgtttttattccagtattctggcaactcagttatgtattgctctactttcaaattcaaataacttagctcatcagattctaacattttattacacatagtttttgcattttctaagtctgatattttagtttcgagaactttctcctgtttctctacaacttcaactaaagatactttctgtaatataatattacggatatcatcaatagtaattcctagtgtacgtaaatatgcaatttttttgatgtcctctacattttcatctgaatattctctatagccattacgctcattacgaaggggtttaattaaattctcgttctcataaaaacgaatattagagcgtgtcaatcctgttttttcttcaacttctttaattgtcattttaaacactacctctctattctattaatttacaactataatatagtcttaaatattttcactctataaaattgtatatttagtatatcttaaaatcaagttaattatcttttataaattttcatacaataatatctcctttcaataatatctctttttctatatttaaaactatcttattttctataaaataatgtataaacaaggtttacagtcaagtatttttattatttttttgatttcataaaaaaaagcatagcaaatcatttgctatacttttttactaaattatttattctatatcttatatgaacttattgtttaactactacacaatactagctttaatcatcatattttttgcaaacatactggcttcatatatttcttgttcatctggatgactttgagattcctcatggttatttaattgttggcgaatatgttcgttgtcaggagaaagttttaacatctctttatattttgctttcaatccttctgctatcttaccttgacatatgaatgaacctaatatttcattatcttttgggataattgattctatcttttctattatactagctccataacttccttttttacttgctcccattgttccaaatagtgctatctttttattgtgaatattttcaagcacttgttttgaatttttatcacaaattcccttgtccacccaatagcctaagaatactatatcataattttcatagtcaataccatactgaacctcccatgactaaagtcacagggttcctgcttcatagaattttgcatactaaaatatgtcttactaattctccacaggctatccccgtagttcctacggttcttacataagttatttattttgaattgttattagtcttaatccttcttttaatatatttatacttgcatttatatctctatcgtgagtttcattacaactaggacaaatccattctcttatatttaaatccttaacttcctcgtttttatacccacatttattgcatatttgtgaacttgcaaagaatttacctacctttacaatttgtctaccataccaattagccttgtattctaattgacgaataaattctgaccatgatacatctgaaattaagcgagatagtttacgatttctaatcatattctttacttgtaaatcttctatgcaaataatatcgttctcttttattaatttagtagataatttttgcagaaaatcatttctttgattagctatatgttcttgaagtcttgcaacttttaatcttgctttattcctatttaaactaccgattgtttttctcgataattctctttgtaatttagcaagtttgtttaatgacttcttaagatacttaggattttctataaattctccacaacttgagatacaaaattctttaattcctaaatctaaacctatctgattgttagtattttcaaatgcttcaatatctacatcagtacagcataatgatacataatatctaccacttggttctttagatatagtagcattaagtattctccctttaggtacttgtttatcccttactttaaccataccaagtttaggtaattttatatgttgaccacaatacacgatatttccatttgtaaagttagttttatatgaaaatctattaattttctttgatttaaatttaggaaatcctgctttttctttaaagaattttttatatgcattatctaaatcttttaaggcgttttgtagtgaaaatttgtcaggttccttaagccattttaattctttttttaaattggtcaaatcagaactacactgtttataagtaaaagtttctttatcgtttttataaacttctattcttttagcaagatacttattatatacaaatctacaacatccaaaagttttgttaattaactcttgttgttttttatttggatacattctaaacttataagcttttttcacttctatcacctcacgttaattgttttttgatacactttttaatgattttatcatatttaatatattatataatgctgtggtgaacaatttattaatcacctatcataatattaacaaatgtaattatttaaaacaattatttagaaggttttatatttaattttaaataacatatttaagaaccgtaagtcttaacttttatcatttttgaggttgtcgttcacataagttcgctactacctatgcagttctcttatgaacttcttacactttcatgcaagcacagactatatcttatccttcggcattatccgttaaggtctacccacttccactaccgataacttgtagtgtacttccctcaagaggaatagtcgttgaagtttctcctattcggagtttacctgctgattgcccattttaaagtacttaggatttaaccttataccatctaaccaattttttctactttcgtaactttcacacttaggtttatttcatccttatgttttagtttgattagctttaggggtttccagcaattcaagtagtattggataggttctatcctatctctacatataggtttccctatatgctgactattttagctactaactcatgactaaagtcacaagtgtgcgtagctattttttaatcaactaattcatttacatctttaatgtctttttcttcttgaatttcatcatatatagcataagcaatctttttagtatttccagttaaacttgaatataaaactaaacttttcatgatgtctcctcctctttatctaaatacttatctaaatcaccaaaaatatattaaccttaacaaattatttatttttataaagatattctaatctagtatacatccaaactgagagcgtgtttgtaaagcatctgcacacttcttattacaataacagcactttttaatctcatctactcttccatcttttactttctgtaaccaattactatctgctagtaattgtcttgacatagaaaccatatctactctattatttgaaataatactttctataaaatctgggctagacaattttccaaccccacatactggaagatttgtgtgtttctttacttcatcagctaaatataaaaaacagccttcatctttaaagtaaggatgattattggttggtatagtatcttctaattttgaatgatttgcaagtgttacatgaaaactgtttacacctagggattcaaattttttaacaaaatactcaacttccgaaagtaaaactcctgcatttccataatgaggattttcttgtcttattgcaaatttatagtctattggaatgtccttaacttcatctcggatactactaattatttcgcttgcaaatctacttctattatcacacgttccaccatattcatcatttctattattaaatatacttgatgaaaaacttcctacaagcctatcaccatgaatttgaatcatgtcaaaacctgctttttttgcattcaatgctgttactttaaataaatttataatatttttaatttcttctttgggcatatttgttatgtaatcttttactccgtcattcattattttttttatctcatcatgtgaagtaattcccatcttcatagtatctttaattaaattaacatcataatctgaacaaaatagttgtgctgatacctttgcaccagaattgtgtatttcatctacaattttcttgtatttaatgactccatcttcatccgataggcttatagctaccttatgaaaactaggtctaatagatacatctcctagagtaatcagagctactcctgacttagcaatatcagaaaactttttaattttttcttccaatttaagacccatgcttgtaggtgcaaaagatactctattttttaattccaaatttccaattttaattggttttaataaattacaatacatcctatccttcctccacagctgtttttatatcctttaccacatgtaaattctttaccagttctttatattctgtatctgagaactctttttttatgtggttatcccactttgaaaatatgttttttatatcccctaatacttcctcacccttatctgttactctcaactgaaaagctctactatcattagggttttggattttttctatgtatccatcttgttctaacctagatatagttcttgttgtatgagctttatcaacttcaaattctgtagaaacatcattcaaagaacaattcctatttttattaatataaattaaatagaaatatagaccattcgtaagtttatatggttttaaacatttttcacaataaagtttaaagtttttttgcaagttacaaataatatatgacaaactttcatactgtaaatttttaaaatccatcttaaatttcccttctataattataatatgtttgactatatcaactatattatattaaacaattaatatagtcaagaatattttattctctaaatctatgttttattaattctttaaaaaactattatataaaataatcatgataaaattagaaattggaatttttaatatgcactgtacataaatatattttatataaaagtttatattttcaaacaagtaatttttcgaaaattgtctaaattcagtaaaaatatggtaatatatacataagcaatataaatctataaaaaggagtgttacatatgatatctaataaaatgcaaactttagttgcaaatagttctgttataagagctatgtttgaagaaggaaagaaactttctgatatttatggtgaggaaaatgtttttgattttagtataggaaatccaagtgttgaacctccagagactattaaagcagttataaatgatattttaaatgaagaatctccaaatttagttcatggatatatgaacaactcaggatatgaggatgtaagagatgctattgctgaacatataaataaaaaagatggattaaatcttacaagagaaaatttaattatgacttgtggtgctgctggtggtctaaatattattttaaaaactcttttaaatcctggtgatgaagttattgcttttgcaccgtattttggtgagtataaaaattatacagaaaactatgatggaaaattaatagaagttcctacaaatatagagacttttgaaccagatttagatgctctaaaaaatgctattactccaaaaacaagagctttaataataaacactccaaataatcctactggtgtcatatattctgaagaattattaaaaaatcttggagaattattggattcaaaacaaaaagaatttaatacaagcatatatctaatttctgatgagccatatagagaaataatttatgatggtgccaaagttccttgtgtactaaaatactatagaaattcatttatagggtactcttatagtaaatcattatctctacctggtgaacgtataggatatattgttgctaatgggcaaatggatgattttgatgatgttatgtcttcattaaatgttgcaaatagaatacttggatttgtaaatgctccttctctttttcaaagggttattgcaagaagtttagatgcagaagttgatgtaaatatttataaaaagaattttgaccttctatataatagtttaatcgatatgggatattcttgtgttaaacctaatggtacattctatttgttcccaaaagctccaattgaagatgataaaaaattctgcaatgatgcaaaacaatttaatttattattagtaccaggttcttcttttggttgtccaggtcattttagagtatcatattgtgtatcttatgataaagttaaaagttctttaccagcatttgaaaaattagccaaattatataatttaaaataactaaatcaaagtaattcaaataattaactaccttagtatagaatacttacattctatattaaggtagtttataattttatgtactatattttatacataccatattattccaatatgcttgaatattcttatctatagtactaatataaattacaaggaggtgtttgacttgaaaaaaggttatgtttatataatactgactaccttattttttagttcaatggaaattagtctaaaaactgtcactaatgactttaatcccttacaaataactttatcaagattttttgttggcggtttagtcttactaccttttgctgtaaaaagattaagagctcttagtctttctattacaaaatcagacttaaaatactttgcatttttaggttttatgtgtgtagtagtaagtatgtcattgtatcaactggctgttctaaacacaaaggcatctgtagttgctgttttgttcagttgtaatccagtctttgtaatgcttttagcttacttaattttgaaggaaaaaatatataggcacaatgtaatttcacttatattagaagttcttggaattatagttataataaatccattgcatacaaaactaactcttagtggaatattcttaacattatcttctgctattattttttcaatgtatactgtatttggtaaaagaaaaaccttaaaatttggtggaatagttgtaacttgctttagctttatatttggtagtttggaaatgttgatattggttttactcactaaaattaattttatcgcagatatattaaataaaaataaacttcatatatttgcaaatatccctatttttagtggatataccttacacaatatgcccattatgatttatgtattcgtatttgttacaggtgttggttatgcactttactttatggcaatggaagctacatctactagtcttacatctttagtattcttctttaaaccagtactatctccaatactagcattattaatacttaaagaaattatccctataaacatggttataggaattttattgatagtaattggttcaataatttctattatacctacgataattactcaaatgcataataaacacgttgaagccttgtataaggagtagtaattgataatctatcaagttatacataagacaaaatttattagatttaaacgcaatataaaagagatgctattataatagcatctcttttatatttattttaaatttattaaagctctatttagctaggttttgcaaaaagctataagtttgtggacaagctgattttaacttactatttgtatcttgatttaaatagtaatatgcaaatgcttctgcaaaaaattcttctggatatacacctaagtagtttacattacctaaagaacgaccttctttagcaaatatttgtttgaattgtgctgatttagatatatcatttaatactatatggtctattgcatgtgctgtttcatgtaattctaaatttattgcatcatgccctttacctttgttactaaatcctattctaagagctactgtacttccacctaagcctggaacatcatcccaagtttttccagtaccttcccatcccttaggaactacaccttttaaataagcatattctttttcatctgttaactttccacttaataattttatttttaagttatcttgctttaatacatttaaatactttccatctatattagctaatctatttaccatagcattagcttcgtttttattgtaatttccagttggaaaaactactatttgactaagtgtgtctttattttgttgtatagtagtactatatgcatgtgcacttactggaactgaacttattaagaatattgatattatagctattaataattttttacttggtctcatattattccctcctttgagttaggccgggagtaataaatttcaaaataaaaaagatacccaagagtatctttgtatatacaaaaagaaatttttactcttttcggcaactggctggcatggtttactaaactttagcccctatagctttgcgtgactaggtttccctagttttgcctcatttaattttatatctatattatagcttatatctttttaattgtctatatccctttggaacttttttctaaaaagttattatttttttacataaatcttcaaaaaaaaatatcttctaacaatattttcattattaaatattgttttagaagatattttttaatataacttatattttttataatgttagggtctaatttgtatttttatttcttcttaatacgacaagtcctacaatagctcctataactaaaagtatttctccaataattgtagtactatcccctgtttttggtggtactggtggatttaccaaagtatcatctttagctttattatttttttcttctgacactgatggctttaccacttctggtattggaacaatctgtttaacaggagtttctatcacctcttctgatggtggtactggtggattcaatatctctggtattggaggatttattatatcttctgacggtggtactggtggatttataactatagtatcctctgtatcagatggatttgatggtttccttggtttatctgtgcttggtggcactggtggatttactattggttcatctgtatttggcggtacaggtggatttactggtggattttcttgtcttatgttttctatatttccgatatctactattctaccaatatctttattaccaatttcaaccttaattttatccttcagtttttcatatccacttggagccatcacttctactaaataatatattcctggtttttttacactagattgaattacaccatcttcatcactaactaaatccttaactactatatttccaaatgcatcttctaaattgaacttagcacctgaaagtacatttttatctaaagcatccacttttttagcttcaaaagcataaccttgcttagtagtctctactcccggaggacttgaaccattaatctgagccacattttgtatagtctccccaacttttacatttgtgaagtctgcatcaaatgtaacccagctttgcacaggttccccttcttttatctgtttaaattcgtatttatttactaatcttattgtattttttccatctccagcttcttttttaagttcaagattatcagaatattttatattagatatttttagagatgggtttacttcatccaaaagatttacttgtcctgcatcataaaccccataagttgacatattgattttgtatttaacaatctggttatcactactatttaaaacctttttatcaacttctttttttgcgcttattaatccagaatttttcttaaagtttatctcatcatttttatcaatttcactattatttgcatcaaggacagctctatttatataactatcttcaatactaattacctttaatgtataagctataaaaaactttgattctacttcttctttactgagattaattgtaaatccagttataactttatctacttgcccactttcatttcttttttcttctactttatatgaaatattattggcaattttttctttactccaaggagtccagctcccattcattggaacttctacaactctaaaatcatgcccatcctctcctgaagtagtcaatctcataccttctggtatattatctgttataacaacattacttattggtgatttatcatcatttattgaaatctgatagtttattacttgaccaacttgagtaatatttgttgctcctgaatgtcctttagtaagaagataattatctcctctatcaaatatacttacagtagcatcatcttcttgtatcttcttaccatcagattcaatcctagctacattcttatatttattaccatgttttgcatttttgtcactgattctagccttatacttaacagtatacgatttatctatatttccaaaattaactgaaatagaatttttactctgttcaatattaaaatcactaacttcttttccatcacttgttactacacttacagaaccatttatcaatgtcaatccttcaggaagctcatcatacaaaataatatcttttaactcttcctgcttttcatttacttgtatactgtaatttatatctttatttttaactggcataaatacagtagttgattttcttccttcaacaagctttttaagtgttcctttagcatctggaacatccgttttatctccaggttttatttctacatctatatctccacttccactttctatttttccagtggtttcaatatgtatttttgcattagtatcttcatcaacctttttaacatatgcttccaaacctattttaccttgcattacactttggccattaggtaattctctaaatgtaagtgtatactctccattactttctgttttatcaaagcattcacttgtataatctaaattaactttattgaatacatctggcaccttaaaagttattgaatctcctgcttgtattccttttgatgttggagtataagttaaattaaatgatatttttttcattgattccgtttctattgtattgttattaatttttacaacaaatccatagtcttcattaagttcttcttctaaaactttcaataaattttcatcttctaatagattatcttcctctggagttttttctgtatttttattgtctagtggtttttcatcttctaaagcttgttctgactttttattatctgttgacttatcttcttctggtatttgctctggctttttattatctattgacttttctccttctggagtttgctctggctttttattatctattggcttttctccttctggagtttgctctggctttttattatctgttgacttatcttcttctgaagtctgttctggttttttattatctgttgaattatcttcctctggggtctgttctggttttttattatctgttgccttatctttctctggagtctgttctggttttttattgtcgctttccttctcctctccagttgatgaattagttgaaccactttgaatctgactattctctcctaattctgaagcataagatacagttggatatattgtagacaccaccatacttaaaatcataattaaactaattaataatgcctttttatttcctttcttcatataaattttccccctctaggttatctatagtttataatcttccattaatatcgtatataaattaatttttactaaaaaattatataaaaaaagctatgaaaataaataaatttatattcatagccggttgcaccactgactcagtatatccataaggtgcccaataatagaatatacttcaacatctctataatatttcataaaaacaattaaaattgctttatttatattaaaaatacaattatatacttctattatattatgcctctatactattgtctatcttttttacattttttaccttttatgagattaattaataattaaataaaatccttatctacaacaattacacaattatattcaggatttatctccttaactaattttgttatatcttcttttaagtcatcctctgacatgtctttggaaaattcggaaggattaactactatatcaaatattaaattcttcttgcttccttttccaactattctaaaatcatgcatagattttacaagactatttttcttaagtatttcttcaagttcttttttggctgacataacttctttatcttcaagacatattgggtccatgtgaattactagatatatatctaatttttcagatatttctctctctgcagtatctataatttcatgtatttccattatatctatgttggatggaatttctgcatgtatagatgcaatacatctaccaactccatagttatgaataattaaatcatgtgtacctattatatatttataagataacaatagctctataatagaatttaccatttcttcatccggtgcttctcctaaaagaggatttatagtatcttttacaagagagaaaccagcataaagtatcactaatgatactacgataccaacatatccatctataggaaaattagtaaatctagctacaataaatgatataactacacaacttgaagtaaatacatctcctaaagcatcaagtgaaactgcttttaaggctgaagaatcaattttatttcccacaaatttattaaaacgactcaaccagattttaatcattatagatacaattaaaagtataagtggtattacttcaaattttacaggaattggatttactatcctttctatagatgactttacaaattgaagtccaaccaacatcaccataaatgctactattaatgctgataaatactctattcttccatgaccaaaaggatgttctttgtcagctggcttacttgctaatttaaaacctatcatagttattgctgaagatgccatatcagaaagattattaaatgcatcagccattatagctatactagatgtgaacattcctatgaatacctttatcacaaataaaagtaaattggacaatatacctactacaccagctacataaccatacttatttctaacatctgtattttgaacgttttcgctatctctgataaatgttttgactaggattttggaaaacatgaaacttacctccctgccctttattttattaacaaattttataatctatatctttatttatgataacataatttatatataaaattcttaaaaatcactctacttcagtaaaatattattctatatatctatttagatacaaattttatatttcgtaaagtttttatggcttagtgtctgtttaatagattctatataagtttttacaaagattatttattatgataatatcatttttcccaagtattacttagaatatgatttttttgttttgtctttacatattttaaatttatactatatttatgtttttataaccttatgatacactataactataagattttaaacggaaaggaatgaaataaatcatgttttttatcagtgatatttacacaaaatcacctattaaatttgatactccattgcaaaaagaggtatacaaaatattacaaaagttagatattgactttgaacgtgttgacacagatgaagcaattacaatggaagattgtgttcagattaataaaaaattaaatatgaaaatggtaatataaaacaacattaaacaaacaaaaaccgcaaagttacaatatatagtactttgcggtttcataagaattaatttttactattagagttcatacttctactatttttcattgttctaagtattagctttacaaattcatttgacaataatatagtggatgcaaatagtattatttttatccacatatcaaagtccaaagaaacagaattaaagaaactctggaacacttgtgtaaatattatttgaattatccctgtaactactattatttgcaatgccagtttatttttaaagaaatttggtattgtactatttaaaccaaattctctacaatttaatgcattaaaaagggcactgaacgcaaataaagaaaatataacagtaccttgttcttctgatgtagctcccaatatattaaaagctgattgagtaaatacaattgtaattataagaatagcatttataataatatttacaaacatagacctagctattattccagaatgtctatttattggttttcttttcaatacataatctctaacaggttctaatcctaatgctagggctggaggaccatccattattatatttacccataataattgtattgtagtaaatggcatatccttaccagtaagttgagatattatagcaattataaatgctactatatttacagtaagctgaaactgtataaatctttgaaagttctcatatatacctcttccccattttattccctctactatagtactaaagctatcatcagtcaatattatatctgctgcatttttagatacttctgttcctgaaatacccattgcaattccaacatctgcttgactaagagctggggcatcatttataccatcacctgttacagctacaacttcgccacttttttgaagcgctgaaactattctcatttttgtatctggtttacttcttgcaacaatagatattcctttaatttcttctctcagttctttatctgtcaatacatctatatatgttgcttcaactgcctttttcccatcatttaataatcctaattcatttccaatagccgttgctgtatttatattatctcctgtaagcatttttacatctactcctgcattaaatgctttatcaatggaatctttgaccccttctctcaatgggtccactattcctacaaatccactaaaaactaaattatcttccttcatataacttcttgaatttcctattaaattcaattcaccttctgaagtcattgcaacttctgttttagaattactcatttttttataagcaaatcctaatgttctcatagatttaatttgtaacttcttaatctcatctaaaatacttttttctacttttggagttattggaacaatattttttccttgttgtacataagaacatttttttaataatacttctggagcaccttttgaaagtaatatatctgaatcctcttgacgaattaatgttgacatcttcttttcttctgaactaaatggtatttgtgatatcaaatacgtttgttttctcatttcattatagttcttatcattatgatataaaagtaatgcacactctgttgcacttcctatatatttaaatgaattatcttctttttctatatctgcagttgaatttactatacagttttgttcaaaatagctgttactttgatactctcctccacttatatatttaccatcaacatatgctacctctaccatcattttgttttgtgttaaagtccctgttttgtcggaacatattacagaaacagaacctatagtttcacaggcttctttctttgttactaatgcatttatctttgccatcttttgcattgttatagctaaggtaatatttatcatagttggcaaaccttctggaacagttgcaactattaatgcaatacaaaccatatatgcatttttagcaggttctaatgattgtaagaaagataatatactgcttgtatctaaaattaacataccttttctctgcatctgtataatcataaacatacacaataaagtagctattacgcctgatattcctgctattttagcacccaacttccctaatttaatttgaagtggagtttgctggtcttcatttgataaattctgtgctatcttacccatctctgtcttatcaccagtatgagtgacaaccattatgcccctaccatatgctacaagagtccctccaaataccatattgacttgctttgcaggtattgcatcctgttcgattatttctgttttagaataaactacttccatatctaatacagcatcagcattcttagctacatcatcagattctcctgttagcatatcttctctaagtttcaaatttatagactgtataagtcttccatctgctggtatcatatctccagtttctatatatacaatatctcctggtactaaatcattttttgatattttaattatctttccatttctaagtacttttacttctatattttctgttaattttgacagggcctgagctgcttttttagattttccttcagttattatgcctatagaaattccaataaaaatagcccctaaaatacctaatgcatcatgtaattctcccacaaaagaacttattactgctgctcctatgagaattaatatcataggttctgtcaaactttctcccaactcgtcccaaaatgttctaccttcttttatagtaaattcatttaatccatatctaagcttcctttcttctacttcattatcatcaagtccaatttctggatttgtttttaagtattttaatacttctttggtaggtttattataatacctcataactttatcccccttgttaattatctataaggaattatatgcttatgatagcttgtatattacttttcaaaaaaaataaggtgttgattaatcaacaccttatagtggttatatattattaaattttatgttacaggctttataaattgtgagctatacaaatcaaaatatttaatcttcaaaatacccttctggatataatgggaacttagatataagttcttgtgcctctgctttacattcatctaatacttctttattatcaatattttctgctaccttattcattattcctgctatctgtataacttctttttctttcagacctctttgagatattgatgtaagacctatacgaacaccactagttacaaatggtgattgtgggtcgtcaggtataacatttttattaactgttattcctacatattcaagagctttttcaaattgttttcctgtaagattcttacttcttaagtcaaccattactatatgattatcagtacctccacttacaatactaaaaccatgtgaaatcagttcagaagctagagtctgagcatttactacaacttgctccattatctttttaaatttatctgtacttaaatataatagtgaaaaggcttttgctgcaactgtattaagatgtatagaccctaatgttcctggaaaaacacctttatcgagtttctttgcatgttctgctttacaaagtacaataccacttcttggtccacagaaagtctttgtcgtagatgaagaaacaaaatctgcataaggtacaggactaggtattactttcgctgcgactaatcctgcaacatgtgccatatctaccataaagtaagctcctacttcttttgcaacctttgatattctttcataatctattaatcttggatatgaacttgcccctgcaattataagttttggtctacattcttttgcctttgcttcaagagcatcataatctatacgtccagtatttgggtctaccccataaaattcatatttataaatgtcatgtaaaaaattaactgcgctaccatgtgtcaagtgtccaccttggtcaagacgcatacttaaaacagtgtcatttggttttaatattgatgaatatacacaatagttagctgtagaacctgaatacggttgtacgtttacatgttctgctccaaatacttcttttgcacgttttattgctagggtttcaagtttatctgcttcttcagaacctgcttgaaaacgagcccctggatagccttcttctgttttatttgtaaatacacatccacttaattcaagtacttctgttggtgctgtactttcagaagctatcatctcaatattgtgttcttgtctaaccaactcatcagctacaatcttgtataactctgggtctgaaatttttgttgtttttaacataataatcctcctcttaattaaagaatatattttattagtttaatcttcattgataaatttattataatggtctataaaacgtaagatattcctccaccaggtcctaatggtatgccaatacccatgaatagtaacaatattattatttctattaatgtaaataccactgagtatggaatcatattcgatatgacagtacctatacctatatctttatcatatcttctggcaaaggccaatataactggaaaatacggaaaaagtggacttattggatttgttgaagcatctccaatacgataagctatttgagttaatgctggattaaagtctagtagcataaacatgggaacaaatataggtgctaaaatcgcccattttgcagaagcacttcctacaaataaattgataaatccagatagcaatataaatcctattatcaatccatagctaggtatccccgactctgctagtaattttgctcctgttattgataaaattgttcctaagttactaagattaaataaattaataaactgggatgctataaatgctaggactatatatccacccatatcactcatactactacccatcatagatactaaatctttgtcactttttatcttcttacttacttttccatacactaatcctggagttaaaaatataatagtgattataggaactatacctttcattaaaggtgcattactagatagtatagaaccagtctctggatctttcataaatgcattgtcacctatacataaggcaactatcactactactacaactaacaatgataataaagcgtattttatacccttattttcaagttcactcaattcctgtatatccttatcatttgttgaatcattatattttgtaaaacgaggagctataaatttttcagttacaaatgctcctgcaaaagttaaaactatcgctgatataaaagcaaaataaagattcattgctggattgccttggtaagatgggtccatcatttgagctgctggtattgtaaatccagctaacaatacatctgtagtactaagcataacatttgctgcaaatccccctgcaacacctgcaaaagctgcaaacatacctacaagaggatgtcttccaattcctaaaaacacaagtgctgcaagtggtggtaatattataaatcctacatctgctgctgtatgtgataacatacctgcaaatacgattgctacagttacaagtttttgtggaactttacttataccctttttcattaacacttccataaatccagatttctcagcaacacctgctccaagcattgtaaccagtactaatcctaaaggagcaaatgactggaagtttgtaactatgctacctaaatatgattgaatctgctctttctctagtagatttactacctttacaacttcttttgtagaaggatgtatttcttctactcctaaattagatataactgctgacaatattacaacaattatacatagtaataaaaatatggttactgggtctggaagtttatttcctgctctctctacaacatttagtgccctcatcaataatccactatctttgtttttttcctgtgaattaattttcctcaaactaataccccctcataaactttatctccagaatgctctatcttaaattttattttttaatttatccatataatttataacagactgacatagtacatttgtacctaccaatatagaatttttatcagctttaaatttaggattatgccactgatatatacaatcttgttctttattgcctacccctaaccagtaaaaaaatcctggggccttttccataaatatagaaaaatcttctcctcctgtagaaggtattggatcaactatagcatcttctgaatacaaatcacacacagacttacaagctattgtgtacatctctttactatttataacagctggtaaatcaaataaataatctagctttgcagttgcttgatatccacgagctatctcacaaactatattttctaaattttctgatattttctttcgtacttcattactaaagcttctacatgtacctgtcatatctaccttttctgaaattacattatttgcagtccctccatttatagtacctattgatataacagctgattctaatggacttatgtttctgcttactatggtttgaatacccattataattgcacttgatgctactatagggtctattgttctgtttggtatacctccgtgacctccaaatccatttacttctatcttaatagtgtctactgctgccattaacccacctaacttaacacctatttttccacaaggtatatctggatgattatgaagtccaaatatagcatcaacttttggattttccattactcctcgttccactagcatcttcgcacctttattgacttcttcggctggttgaaatataaactttacatttccatgaagactatctctaatatgagacaatacatatgcacatcctacaaggcaagatgtgtgtatatcatgcccacatgcatgcattataccatcatatctggatttatactcaatatcaacctcttcatatattggcaatgcatcaatatctcctctcagtgctactgtgggaccatcatacttcccttttaataatccaacaactcctgtttccattcctaaatctaatatttctatgtctaaacttactaataaatcttttatagcttttgtagtcctaaattctttaaaacttaattcggggtgcatatgaatatctgtaaaaaaatctaaaatatcttctttatacttttctgagattaaaataagttcatgcatactaacacctctccaaaattttatttttttattttttataatttaactacaaattatataagttaataatctttataaagatattttttataaatttaattttagtttatatttatattttactatattattttaattaaatatattatcatgttttgcaatttatttaactattttgactttttaaattcggattatataaaaaatttctttaaataaaaactattaataggtgactctattcctgactttgtgttgatttttttctacatgtaattgctttatacaccatacagactaaaattaaaagccccatataacctgtatatggatataaaatgtttactaatttaccaaacggtaaaaaaccacctatacaagccaaaatagctattactgttgttaccaatttaaatttaggatgttcatcttcaacaattctattggttacagaccataaaagtggaacagctgttgtatagatacctaatattaatgcaactgaaaaacatacacctacaataggagatatattatctgctaaataaagtgatggtatttctttcatatacaaatttcctatatctgaaatcatagccaaatacataactataccagcagtcataaacactattccacctaataaacctccccaaaaagcatcctttttactttcaatagaagctcccattcctgttaaaaaaacaatcattacaataatatttaatgtattatatattacaccagaaacgattggactttctgatgcttttgtaacttcaatatttttcatagcttctccaaccatagataaaccatcaaaatgcttaaacaagcttattaatccaacagcaattgtaaatactgctatcactggtccaatacgtccaagtatgcttactaatttttctaaacccatagacactgtaattaaagtagcaacagccatcaatactcttcctaagtaaggatttataccatagtattcagttaaagttgagcctgcacctgaaatcattactataagaatcccaaataaaaatattggactaaaccattcgtaaaattttcctaaaatcttcccacaataaaaagtgtaaattcttgttggttctttaagttttaattctctacctctagttataacttcagcaccaagaaatgaaaacaataccattgatattaatgctccaattaaacccatatacccttgtgaggcaaaaaattgtagaatttcttgaccagtagcaaacccagaaccaattgctgttgctagataagcgcctgcaatacagataatatttttcatattcactttgtctgacatattaaattacctccattataaagttaccttcctttaagaaatataaactctcagtgaattaaatgaaaattctgtctttttgaaacagtatttaattcactttttttattttgtatatctttttctttttatttatatatatttttttatataaataggtacagcttttataaggtttaatattattaaatatgtttaaagcgctttaatttttatcataattaaagtatacttattcagacacactcaaacaattatctatattgactttttatttatcaatttcaatttttagtgttcagtttataaacttttggagtcattcctttttctatcttaaagtttttataaaagttatttaggctattatatccaactatttctgcaatctcatttatactttttgtagtattttcaagtaattcaatagatttttctattcttatatgatttagatatgatataaaagttgtatttaaattacttttaaaaatcctagatatattagatggattggttaaaaataatctagcacaatcatttaactttaagtcattgctatagtttagatttatatattccagtatctcatttaataaatcattattggtatattgatatccaataattttttctacagacttagtaaattctttcatatccaatggtttaaggagtatatcttttacatttaatctcaaagctttttgagcatattcaaaatagttaaatgcagttattactacaaagtttatttttttagataaatgagatgttttttctattacttctaacccattgtatattggcatttgaatatctataaaaactatgtctggctctaaaccaatgattttatctactgcttcatcaccagatgttgctttaccaacaatttttattggcatatctttcatttctataaaatgtgttattatttttagaacagcttcttcatcatctattattagtgctcttctcatgagaatacctcccttttagcttaataatataaaaaagtaagatatataaaacaacataaaaacatctaatatatttcttaacatttataaaacttattaatttttcacaagttctatacatactccttataattttcaataggaattttaatcattatgtaagttccttcattatcactcgactttatatccatatcaaaattatttccataagcagatgtgaattttgtatatattaaagacaaaccatgaccattattactacgaatacctgcctttattttgtctatattatttccatctaagatagttccattattatgaatctctataatagcatactgagaatctaatcttgcaattatttcaattcgcttttctgtgtcaatatctctaaatccatgtgtaaatgcattctctacgataggttgaataaagttaaaaggcacagaaaggttatataacttctctggaataagatattttactttaagtgcatctccataacgtaatttctgtaaattcaaataatttttaatgtataatatttcagattctaattctacaaatcttaaatcagacctcattgtatatctaaacattcttgataaatctattattgcactatacaaatcataactaccatcatctagtgctatgcttgccattgaatttaatgtattaaataaaaagtgatgatttattcttaaattagtaaccatatcttgagctacttttaaattcatttcaagttgctctccataatgatatgttcttgctatagtcttctctttttcttgtaaatcctttcttatatcattaaaagagcaaaaatttattatatttttagatatttgtttcaagaggcgttttatacttctagcagctccctctggaatatcatataaattattatgctctgtatctaaatttaaatcagataatagtacataccctcctcttataacacctatgctattgcttttgtacagtattggtatattatatatagttatcccatattcacatacaaattgattgctacttttttgattcatacaatcacaattttgaggaaatttcataggattacatttttcaaaacaaaaaagtggaaaataagggttttttaaaactatattccatgaatcatcatatataattaatggaattttaaacgggtctataaattgaccacgaattgattctactgctgcatacaaatttaatgtactttcactataatttatcaaggtcttctttaaataattattaggattaatatctataacttcactctctcctacatcatctacattatttgaaacaataagttcttttatttctctatcgcctgtatttatagtttcatgtgtgctaccagattctatataaaaaatcataccttgataaaatggcttccaaactccatttataatatacaaaccctctccctctaaaatatatatcatctgctcttgaccataatgaacatgattaaaatgtttcttaccaggcatagttactgcaatgtatatattcatagcttgttttggattattttcatcataagtatgtttccattcaatatatccccactcagtattttgaattttcataaaagattcctttcctgtaaattatttatgttcatattgtgaaaaattagtaaaaaaaatgtgtacatactctttcatatgatagcttactatatcaatattcattagtttgtacacatttttatattaattatttttttttattacttctattattattgtatcacttttatattaactatttttttattacttctatattattgtatcacttttatattaactattttttattacttctatattattgtatcacttttatattaactatttttttattacttctatattattgtatcacttttatattaattattttttattacttctatattattgtattgcttaaaaatacataatttaactcttatttaataacagaaactcccatatatggtcttaaaacttcaggaacaaccacagaaccatcttcttgttgataattttctaatatagctgcaacacttcttccaatagctaacccagagccatttaatgtgtgtacatattcagctttagaatctttatctcttttaaatcttattcctgctcttctagcttggaaatcttcgcagtttgaacaagatgaaatctcaacatacctattgtaacttggcatccaaacttctacatcatatttaaaagaagccgtaaatcctaaatcacctgtacatatctttactactctataaggcagattcaataattgtagcatagtttccgcattgttagtaagcttttctaactcattgtaagattcttctggtgcaactattttaaccatttctactttgttaaactgatgctgtcttactaaacctcttgtatctcttccagcagaaccagcttctgacctaaaacatggagtataagctgtataatttattggtaattgttcaaatttaagtatttcattagcatgtatattagttaaaggaacttctgatgttggaatcataaaatagtccagaccttctattttaaacatatcttcttcaaacttaggtaactgtcctgtacctaaaaaactatttctatttgccataaatggtggaatgacttctgtatatccatttacttttgtattcgtgtctaagtaaaaatttaataatgctctctctaatctagcacccaatcctttgtaaagagtgaatcttgaaccagttattttactcgctgtttcaaaatcaagtatacctaattctgttccaatttcccaatgagccttagattcaaaatcaaaggtagtagtctttccccaagttcttacctcaacattatcttcatcagtttcaccttgtggtacttctggatgtggtacatttggtattctcattaataggtattccatcttatcttctacttctttaagattttggtctattaccttaattttatcagataactcttttagtttaatcttttcattttctacatctttaccttcttttataagatttggtatatttttagatgctgtatttaatttatgtttcataacttcaacttcttgaagaatctttcttctttcatcatctaacttaactacttcatcaaggttaaagtctttttcgccccttctttccattgctttttttatacaatctaaattttctcttattctttttatatcaagcattttttcctcctcagtacctaagattggatttatctcttaatctcaaataacttagataatatactttatgcttgaggttaagaaacctttttctttatccgaacctgttatttttattttatttatattttactcacttttttgtccattgtcaaattatatttaattaaataaatgaaatttaattttaggagaatattgctagatttaacttcattataattatatctattttgctaatcaattatctattttgactttttctttatcaatcttgtatagttattaacttttatataaatttttttatattataacatagtcctatatatctattatttggatagaattattttttaaattagaattattttaatgaatgcttcaagtaataggtatgaaattgaatcttttagaactgcttataaaaaatactcaaagaaaaatagtaattttctcagattcacaatatattttatatgaaatgttataaggtaatctatttaataaatttaaatttgctattatagatttagttccaaagtcttactgcaaagtaatatacatagttttttaataaactaataagtgcaattaataactacttaattgtttaatatagtacatagataactttaataaatcgacagttatttaaaaaggtagaatcaataaaattatacttataaatcttcaatacaataattaaaatttaataaaaaatataattgttgatttaactgtaatcttatttaattctacctaacttattatataaaactattttttatagattataaaatatctaactttcatctacttcaaagaatacaatacttctccttctcttatagtctgcaatactttaatatcttttattttcatagggtcgattgtaagtgggttttcatctaatattatcaaattagctaatttaccttctttaattgaaccttttttatcttcttcaaaatattgatatgctgcatttatagtaacaccctttaaagcatctaatgggcttatcttttcattctctcctatttgtatacctttttttgtaattctatttacagcacaccatactgtttccagcatattaggtgctattactggtgtatcctgatgaagagtgtaaattaatcccttttctatagttgttttaagtgggctaatcttaaacgctctatcttctccaaggtttttgatatgaatatcaccccaataatatgtgtgagctacaaagtatgaaggtatcatatttattactttcatatcatcaatctggtctgctcttactgtttgagcatgtatcataactggtcttatattattttcactactttgctcttttaagtttaaaactttctcaaacgcatctatcaactggtctgctgctgcatctccattacaatgagttaagagttgcatcttttcttttagtgaaatatctataaacttttctacttcttcatctttgtatataggatatccacaataaccatcatctgaattttcatatggtctactcaaccatgctgtcttaccttgtggagaaccatctaagaaaatcttataacctcctactttaaatctatttatatatttttttataaactccctattattatctaatacagacttactttttttcaaatttacatatcctacaacatccatttttaatttattttgatttgccattgcttttaaaatgttaaattgattttcttccattaaaccttcttgagctgttgtaataccatagcttagatatatgttctgtgctttttcaattgaattaaaaatctcatttgatgatggttgttttattttagatgctacattaaaaaatgcattttcttctaaatatccatttggttcttcactgccttctactctacctatatgtccaccttctgggtcacgtgtttcattggtaacaccaagctgttttaaccccaatgtatttgcagctcccatatgaccagaagcatgtgaaattagtattggattttctgaagatgcactatcgagtacactcttatctggatgcttattttcttctaaaaaattattatcatatgaaaatccaattatccagtctcctttttttatattattcgactctttgaaatcctgtattttttttactatgtctttaaaactggttgcatcttctaaaggaactagctttagagtagtagcaaaagctatcaagtgactatgtgaatctataaaagatggcatcaatgtcttaccttgtaaatctataatttctgtatctttatttttcaaagcaaatacttcttcttttgttcctatcttttttattattttatcttttataagaatagcatctccacatattgaatcttccattgtgatgatatttccattgtaataaattttttctttcataaaattctccttacgttgtctactttaataaatttttttcattattttctgcttaattatattatcttctttataaactttttctttagagtttaatcatataaaagttttatttttaattattgtttgccaagaagtaaatactattcattgtaaataagacaaattaataggctttatactaattgaaaaaatattataagttgttaaatttaaatatctaaactcaattatatctgtacaattgtaattttttaaatcatgatgtattattttaaatatacagttacattattattcacaatataagtatcttagttctcaaataacatctcatgtaatctattcaatgcaaaaaatttaaatattttttaggaggttttttatgagcaaggaaaataaaaatgtaagaattgctgttgtccaggcgtcaccagtcataatggatttagaaaaaactgttgaaaaagcattaggattaattaaagaagctggtagaaaaggggcaaatatcgtagttttccctgaagcattcatacctgcatatccaagaggtctttcatttggatttgttgttggaagtagaacaatggaaggtagagaagattggaaaagatactatgataattctgtaccagttcctagtgctacaacagatttattaggaaaagcagcacaagaagcaggagtatatctatcaatgggtataacagaaagagatggtaatgatataaattgtaccctttattgcacaaacttatttttctctccagaaggtaagctaattggtaaacacagaaaacttaaacctacaggaacagaaagatgtatttggggagaaggagatggaagtactcttacagtagttgatactccatatggaaaaatgggttcgttgatttgttgggaaaattatatgccattagctagaacagttctttatgctaagggtgtaaaactttacatagcccctactgcagattcaagagaagagtggcaagcaactatgaagcatattgctttagaaggaagatgttttgtaattggatgcaatcaatatgttgaaaaaaatatgtatccaactgaccttaactactataaggagctagatgcagaaccagaaattatgtgtccaggaggaagttgtatagttgacccttttggaaaatatgtagcaggtcctattttcaataaagaagaaatgctaatagctgatttagacctagaaaaaatagtacttagtagactagattttgattcagaaggtcactattcaagaccagatgtatttgaattaattgttcatgaataatctttttacacaaacatctacataaatttttttacataaaaaaatgagatactcataagtaaatttcaagtatctcatttttgcttaaaacctataatcctaattataaatttattcgcctatattttttctaaatcaactactgttcttccaacatgttttcctgtcattatcgaatctatactatcatttaactcttccaatgatactacatttaccatatcatctaaatcatctaatttccattcatttgataataaatcccatatttttaatcttaagttcattgggcaatccacagaatctataccatataaagtaattccctttaagataaatggatatactgaacttgtaaaatcaactcctcctgcattaccacaagttgttactgctccacaataattagttgtctttattgctgttgctagagtatttcctcctactgtatctattactccagcccatcttggtctaagcagaggtcttcctgagttatcatccacttctgacctatgtataacatctttaacacctaagtttagtaatacttctttttgttcttctaattttcctgttgaaactacaactgaataacctaatttaatcaatattttagttgcaattacagcaactcctccagtaccaccagtgactaatacatctcccatattcttgtctacagaatctataaatttatacacagataaagctgctgtaaaccctgctgtaccataatccattgcttcttttagtgaaagatttttaggaagtttaactacccaactagaaggaactcttatgtattctgaaaaaccaccagaagtattcattcccaagtcataacctgttactaaaacttcttctccaattttaaaatcatcacaactactagattctactataccagatgcatcaattcctggtgtatgaggatactttctcgtaacacccttattaccatttgcagaaagtgcatccttgtaatttagagaagaatattttacttttattagaacttcgccttctggcaatgtatctacttctctttcaactatatttcttctaaaatttccttcttcttctgtaatatatagtgatttaaattttttattcataaatttcctcccaatacatttagttttatgttaaactaattatagtttataaatagttttatgtcaaactaatttaaatagattaaagattggagaataatttatggaagataaatatattgtacatttcataagtaaaacaaaggctagtatgattaaattcattgaaaataaactcagtaaaaatggtttaggtgagttaatacctactcatggaaatattttaactgcactttatgaaaataatggaatacttacaatgaaagaaattgcagctaaaataggaaaagataaatccactgttacagtgttggttaataaacttataaacctaggatatttagaaagacaaaaatgtacaaatgacaaacgtatcacgtatataaagcttacaaaaaaggcactgcttatagaagatacttttaatagcatctcaacacaagttaaagagacagcataccataatattacagaaaatgaaaaacaagaatttcttagaattttaaaaaaaattaatgataattttaaaaatgctgactaaattgagcataattatatctcctattggaataataaataaaaagaatcaaatattgtaaaaatttattatgatagagaggtagaatatgaatttaaaagatagtaaaactaaagaaaatttattaagagcttttgcaggtgagagtcaagctagaaatagatacaatatttctgcatctgtagcaaaaaaagaaggattatatataatagagtctttatttaattacactgctgaccaagaaaaatcacatgcaaaacaattcttttctaaattaaaagaatttgctggtgaaaatataagtatatcaggagcataccctgtagatttatatgacaagacagcacaacaccttaaagctgcacaacataatgagcttcaagagtgggatgatgtatataaaaactttggaaaaacagcacgtgaagaaggatttgaatctatagctaagttatttgaaaatatagctgaaatagaaaaagttcatggtgatagatttggtagatatgctactgatttagaagaaggtactttattcagaagaaatgaagatatacaatggatatgtacacattgtggccatatacatataggtaaagaagctccaaaagcttgtcctgtatgtcttcatccacaaggatatttcttagattttaaaaactcattatttgaataaactaaggcaataattctatttaaacaatttactatatttatatcaagtatttttataaatactgtattatcttaataacaataaaatgaaccattgatattactataagtagaaaatgtagtttaaatacaatttatagtaattcatcatggttcattttattatttactaatccctataacctacttaaatctatctttaacttttacatactcacataaaatcttatctttaaactaaatatttaaataaagtgtattttaagtagattattataatacattatataagataatacactatgataactttatacttatatcatttatttcttttgtcaagtcaatctcaataatcttaactacatctttttcaaactttacttttttataatccagacatcctactacgaatggaactccaaactttctaaacaaataaatctttccactttcattgtatattgatgtaaaattttcttctattatattcactatcaattttaactcttcaaaagttattatagatttaactaaaaacttctctattatgctcaatataagcagttcttttttacctatgctttgctcttttttatataaattttgaaatatttctttggtataattacatataacttctttactgagaataaaatcaatgtcaaattccttattaatatcctttttcataaacatatttgcaatatcatcaagagaagtctcttctttcatagacaatattaactctattctttctagtattttatctcttggaaagaaagtctcttgacctgtaaaagctgatttttttataaaccattcctctggtattatgttttttcttttccatctatataattgaccataagatatattagttttgctcaataaatctttcttagatattaattcttccataacttttctagcccacctttatactgttttttacagtagaattatctgaaactgataaattatcactgtattcaatatttccaacgtcacaattatctactagagatatgcttttgcctcgtatatcttttattgatgcatcttctaattcaatagtatctccctctatcaaattacatttaaactttcctgaaaaaatattaatgattttaattaatgaaaaagcatctttgcttcttcctatttttatattagttgcccctatctctttacaataagaacctcctcctgaataaacatatatattttctccatttaaaagaccatcacattttattactccatatacctttatatcttcacattctatatttgatttatttctcatttcgccatagatttttatatcttgtgcatacatattttcatttacacttaattgtcctcttattgtaacattattacatttaagtttgccatccactttctgttgagcagttataactaagtcatctatttctgcatctccctctatattaagttgaccattcactcttacacgctctgctttaagattgcctcttataatagtttttccgttaacaacaaaattttttatattgatgtcaccttcaaattttgcatctccaaggacttttacttcgttacttttaacatttccttttgatttagaacttcccacgatttttatattttcatactcaccactacttataaagccttctccaagtatttttatagaccctttttccatattattacctcattttaaattttatttttaaacctatttattacttatccttctttaattttattttttcacttatattctttatttcaccaactattgaatcttcatcaatctctatactttcactgtactccaaactttctacataacatcccttgcctattttaatattttttcctcttacaactttgacttcactattttctaagcttatttcatctgcttctataatatttgcaaacaatttactttctgtatactttctaattgataatagacctaaacttattaaatttgaagacactttttcaaagttgatatgctttttttctagcatacgaaattttttgcaataatctccatgccccttttttatatttatactacttgctccaacttcattaaaattagaagttccatttaaactaatattaacttcttcacaattcaaaaatccattacactccaagattccacttaaattgatattttcacaatctatattctcatttgcttttaaatatccttctccatgaataatatccgattttatacttccttctacattaataattccactagtatcaatttcaacagaattaatatttcctgtacatctaagaagtcccgatatctcaacttttgatgccagtatgtttccttctactttacttaaaccagatgtaaaaaattcattacattctgttgtcccaaaaacttttgctgaaccagaagaatcaaatttactacattttacacttccttctattttgcctgttcctgatatattaacattatcaaaaattccacctttacattttccaacaccatcaaatcttagtgaacttaattcttcattcataatgatatcctttctttaccgtattttatctttaaacctaatataacaaaacattgttacgttgtcaagtctgataataatacttaataaagcaactatcatttattttctataaataggcataaaaataatagggaaatgctttatttaaactagaaatctaatttcttagattgtggtttaaataaaatatatccctattactcaatctttatatattcattgtataaacttctaaaatataagtctttaaattctactgtcaatactttttatacactgtttgtgctatcatttcacacctaaaggagtaggctctccgcactattctgtaacctaaaagacactatcttcttctatctattgataaatttttctattacatcagctagtctctccatatcagttggataaacttcacctatgctacctattctaaatgtatctatatcagtcaatttacctggatagataacaaatccattatcttttaaataagtataaaattccataaattcaaactttgcatttttaggatataagaaagttgttattacaggtgattgagcattatcattcaccaaagtatcaaatcctaaagattttaatcttgaagctattgtaaactgattttctttatatctagcatatcttttttcaacagaaccttcttcttccaattctaataaagcttgataaaaagctcttacaacatgtgtaggtgaagtaaatctccatttaccattatttttctccatagtctcccattgcgcatacacatcaagagataatgatttagctatacctttacatttagataatttctctttattagctattataaaaccaaatccaggtactccttgtatacatttgttagaactactaactaaaaaatctatattaaaatcttcaacatcaatctcaattcccccaaaactactcatagcatcaactatataaattttgttatattcttttgcaagtttccctacctcttgtataggatttaatctacctgtagtagtttcacagtgaaccattgatatatgtgttatatccttgttttcttttaataaattttctactacatttaaatccactgcttctatatctttaaatgtgcagtcaacaaattctatgttaagataattacatatatctttcattctctttccatatgctccatttgcaattacaagaagtttaccatcttttgaaatagtacttcctattatagcttctactgaaaaagtcccacttccttgcattaatacacttgtgtatttatctgtattttgggttgctagagatactaatcttcttctaacatcttgtactaggttattatattcaacatcccaagtacaccaatcttttaacatagatgctcttactgatttagtagtagatagtggtcctggtgtaagtaatatgtaatcattttctggtacaaaatctgatttaatagtttcattctctatttttattagtatatcttctaactcagccatagtttctattacaaaatgtgcacctgcctctttaaatttctttgaaactatactcatcttagcttttaattcttccttatccatgttctctacttcttcttgtgtaagccctaactcacttgaaccttttattacagcaacactccacattcctgcatttacgccttcttttacatcacttattgtatctcctacttttaccatagaactcataggagacacccctaaagcttcagcatttttatagcacatccaaggatacggtcttccttgagatacttctgatggtgttacaagaaaatcgggtgagtatcctttctttgctgcatttggttcaactatgttcatcatctctcttgtataacccgttgtagaacctatttttaatccattttttctcaacttttcaatagtttcaacaacatgaggaattggagtcgtatactcttctaatgtctcaaataacattggctcaaattcagcataaagttcatttacatcatcttcagttggcactttaccaaacttatctgaccaaagattttttattctatccatttcacacatttctcttatatggtctatttttaattttcccataggttttcttgcttcttccattgttacatctatacctcttcttttaaatatctctataaatacattaagaggtgcaaaacatccataatctactgttgttccagcccaatcgaatactactgcttttattttttctccatatatctttttcatatttatagcctccatagattcattttagaatttttgtgtttttaattgtttttacttttaaagtataactttcatatgttaattatacatcatatttaggttaaatatatattaaatttctgtttttagttgtatttaattgtttttattttatatcatatttccataaaatcctaagttacaatctaaaatttactttctaatcttaatctatgaactgactatattttatgaatttagttgtattaagcatagttgtattatataaaactaagggtttattttgcttctatccatgttatatttatctcatttaacttatccttccattcattcggaggttctacatcacaaataacaaaatctaattcctctaaatctgctatcttatacatactagcaattcctattttagaactatcacataatacaaaactttcctttgaattttttatatattcttttgacaacaatgccttattttggtctatactactaattccaaaactatcaagtataccttcactagatataaaagctttatctacgtataagtttttcatagtgtctattgacattggacatgctgtcctttggtgttttaaatttacttttccaccaataaatataacttctccatcaaacaaaccttgattctcataagaaatcaattttgatagaactggataagagtttgtaataatttttaaattgtttacagatattatataatctacaatctgcaaattggtagtaccttcatctatgataattgactcattgtcatttacaaacttagctgcgtatttagcaatactttgttttttatctaggttagtattgtttctctttatatgttctggttcaatcactccataatttatttttatagcaccaccatataccttttttaatttattttcattttctaattcttccaaatatcttcttattgtttctgatgatacttctaatctttttactaattctttagtatttaccttcccttttgaatctaataatttaagtatttctttttttctatctatcgaatttaaagacattcattttcctcctaaatataatatatttttctcctataatattacaatgatacctaagatttatgaaatcatatttatgtattaaattttttacttaattaaagttattttcaaaagactttgtattatcattaaaaaagtccatcaaatattagtatcagatggactttgtaaaattttattttataaattaatatttaaagtctaactactaatttattttcttgtctccaagaattttactaaattatttacagtagacatatcttttctctctaaatcagttggttgaagctctatccctaatctattttcaatttcaagtaaaacttcaattatagctaatgagtctaaaagttccgtctcaaataaattaaggtctaaatcttctcttatctcatcagtccctaatacatcttcaaatatttctataactgtttcttgcataaattttcctccttaaaattaagctaaataacctgagaatatcagcaatccaaaacacacaatatggaatgtaatgaaaatctgcactctctcgaaccatttatcttttttatgttttttataaaatttagattttcgctgatatatatcagttaacacaagtgccaatccttggtatacaccataagcaacataataccaagttagaccatgccaaaatcccattgttatcatggttatcatctgagccacatgagcagcagtagtccttttcttaaatcttttctttctcattgatgacataacaaatctagaaaaaatataatctccaaaccatcttgaaagacttatatgccatcttgtccagaactctttcatatctttactgataaatggcttgtcaaagtttataggtacttgtattccaaatatgtaccctgtacctatagcaaataaactatatcctgcaaaatcaaagaacaggtataaactatatgcgtacatataacttaaaatatttataaaactcatatctttaggtattcttgatacccaatatgtatttatcaaaaatgctataacaaacttataacctactcccatgacaatattttttattcctggcagtaagtattcttctatatactcttttctagagatgtgtttttccaagtcctgttcaaatcttcttgacctatcaataggtccagaacttaaagttggaaaaaataacataaaataaagcatctttgaaattttaacttcttttatagctccatcataaatttcaataaccatttgtatagttctgaaatttaagtatgatattccaataaatccaattattccaaaagaagtaactggagatattttatttattattattgggagcattgatgcaaacaagaatccccaatatatgtatttatttttagtttttcttcttacatattcatatcctttaactattattacttcaagaataataaatattaccaaatactttagctggacatcaattcctactattaagaatatcataaacaaacttgccaacataccataatactttatattcttgcccattagacctaaaattactgctggtattgatgttaataataatatataaagataaaaataatctccatactgtgaaaaaatcattaaatttcctccataagtttctttctgtctattttaccattgatatttgttggaaactcagagattattgaaatatttcttggaatcatatatgaaggtatatactttccaagttccttttttattatcatcccatttttaatattacttaaatcattcttttcatttaactcaacaataccttttaagtaagcaattttttcgtccttatatactggtaaaactactgcattttttacattatgtacttttctcaaattattttctatatcttctatttcaattctaaatccatttaatttaatctgaaaatcttttcttccacaataatatatatttccatctaaaagatatcccatatctccagttttataagctctccactttacaccatctatttcatcatagaaaaatacttcatcagtcttttctttattattgaagtaacctttagaaactgatggtccaattattataatttcacccttttcattttctttaagttcatttccatcttcatcaagtatttttattttacaatttgacatagggtatccaactggaagacttttttcatcatctatagctttttgagtcatatcatttacacttacaccaacagtagcctcggttggtccatatccattgataattcttgtgtttggaaatctactcataagttctttagtaagattttttgaaagtgcttctcctatgaatatcattgactcaaggttaggaagcattttactattaaactctttttcagttatacatactcctgcaaaagaaggagttgacacccatacagctatatctgagatactaaattgtctaaatagttctttatagtctgctaatacatcttttgatattgaaaataatgtagctccatggataagaccagggtatattgttgtaactgaaaggtcaaaagaatatgctggttggttcattattactttttcacttccatctatgtttagatatgggcttatccaatctgaaaagctatctaaattgtttgaacttatttgaaccccttttggctttcctgtacttcctgaagtaaatagtatatatgcattttcatcatcttttacccagttttctttatctaatgattttccctgatattcatttattatatcatttaatttatccatatcaattacattgatatctccaaaatttctttcatcactaaaattaaatattacttttggttttatctctttagtgacttcaaaaactctatcaattggaaaactaatatcaagaggcacatacgctctacctgattttaaagctcctatcatacatgccattatcatgttttctttatttccataaattactataggagtatcctcttctttgtatacatcctttagaaatactgatatagcatctgaatattcatttaaatctttataagaaagtttatctccattacacattagtgctgttctatctgtatttgaatatttttttattccttcaataattttcatataagaatgctcctttaaaatccgttataaataaatggcaattctttaaatggagtaaatgttagaactcctatcgccaatattataaccatagttaaacaaatactagttaacaaatctttattgttctttaaatattttaaataatctctcacagacatctacccatcctttcgtaccaagatgcattacatcccttaaataatacttatctgaccctttatctttaaggtttagaacttcaaagcctttgctttctgctattttttgtgctttatcgtagtactgatttctttctttttcagaaataccagtcaaattatagaatttatccatacttgggattaatacaacaactggattaatacctaagtcagtacatacatttagcatcagtttataattttcaaactccttagatgttaataaatttacatctttgtctcttcctttgtattgctctataccatctttaaaatgctctttataatagtacttatcaatatttagtggatttttaccaactctttttttagcatcttcaatggctttctttctctcatatgaccaatttattggtctttttctttttgttgctctctttttatctagcttaattaatcgtttataaagaatacccttttctttaagagctatacagtactttcttccttgaaaataaggctctaaaagcaccttttcagctttttcaggaaatgtcttaggttcatatagcttagcatataatgcttctgctttatactcatcacttccccataatagcttacttgatttttttgcatattcaatcttattttgtttagatatttttggattatctaaaaatcgataaaattgtattggtgaaaatctagactgataatggtgacttgtgactccgtctttttccataaaccattgcatagaaattaacaagacaactttcttattatcaatattaggattcatacttcctaatattgcagcatcttgtaatgtctgagtataggctctcccaattgcaaacaccttatttttactcctatttgtattaaaatagtactttggatgttgttttgttgaattactaagttctgatgaccccaaaatcataatatccttttctcttaaaaaatgattatttgctgtaacccctttatcttttatatcacttaaagtatcatccataattggaagtagatttttctccctcaaaagttcatcagttttagaatcaagaaatttgtctaacccaaataaaaatactacgcctattataaaaggtgtaataaagtatatcaattttctcatattttctctcctctaaaaatattcaaatttatgttattattaatcatattagttttgatatgtatattcaactacaaaattgtaataaaatcgtcaaaactttttttgatactgttacaaaattgtaaaaaaaaagaaaaaaacaccaaaaataaatttctttttagcactttttcatacttataatttgacattttaacacttggctaagtatacaccttaccttaacttaaaattaaatttatttaagaatatatattataaattcttatattttctaatataagctatatactatcagctggataaacaatactactttgtcttcttatctcatccataatttccattactattattgaattttcatgagaatttatatttgattctattttattgttatttataagacttataaactctacaagttcataatacattccttctatttctctaggcttttcctctgctttttcttttggaatagatatatcttcttctcttccatctctgtatttaataatagctttttcaaatagattaagcttttcaattattatacttccctcttctccttgtatttcagatggtatataagaatcagctactttagaatactgaattattgcatccatatcatcatattgaaatacagctgaaccttctccatccactccagtttgaagtatatgagaaactgcctttacagtttttggagcaccaaataaattcaccataggatgtatacaatacactcctatatccattaaagctccatttgacaactcttttttaaaggcattttctataattccatttttatatttatcatatcttgaagaatactgacaatagcttccaaaaaatcttcttattttccctattttatacaagttttctttaactgctttaaagtttggaacacatgtaattctcatagcttccataagcaatacattattatctttggctgtttttatcattgatttgacttcttttaaattagatgctaacgacttttcacaaagcacatgttttttgtgttttaaacaagtaatggcttgctttgaatgtaatgcatttggagaagctatatatacagcatctatatccttcgatttagccatttgttctaaatcatcaaaaaaaatacttgctccatgtagagttccaaattctctagctttttctaaatttctagaatatacagcaaccaattcaaaatctttaaccctagatgcagctcttagaaatatatttgctatattgcttgtcccaacaataccaaatcttattttacccatcataaatcactccccattttctacactttattttaattttaataaaaaactttacaacttatagatatattataaaataattttatcaaataaaaaagaaagctaattttaaatgatttcaccattttaacatagctttcttttaactacaatctaaattcaacttatatttttaaagttatctttctactatatctttatttcccctcaaaaattttatagtaagaatttcatccacaaacaatgttactaaaagtatagttacaagaattggccaataaggtattataagactatataaactatcaactatatacacttgaaaatatctaactccaataaatgtcaatatagtccaatatacagaaaactttagacatactattcctctactattgtacttataatctgaataatcccaatagaccttattaaaatatactttcataagtattcctgtaatatattctactactgtcggcactactagacataataaaagcaatgcaaatatattattggggtcaataaatcttgagacctctattataatcgacattgcaattgcatacattggtttaaatggaccatttaaaaatccatcttcttgaaaatgcccttgtttataataactatataagttttcaattatccaacctataaaaccatacaagaaaaaattaaataaaaaatataatagagaacctacattatccatgaatattcctcctagctgtttatacttattttttctcatattcatggatttattctaaatcaaagaaattatatttaatttatttaattaatactttatattatagattgtgacattctttagagttcaaactttttaggtattctctaacttccagtaaattttcaagtatcttatgtgattgtgatttaatttgctcatctggctcttttaaatctggtacatttatacatcttatcccaccattgtatgcagcttcaactcccataggcgaatcctctatgacaatacaattttggggattaacatttatctttttagctgcttttaagaatatctcagggtttggtttagagtttacaacatcatctccacaaactatagcatcaaagtaatcttttaaatttgccttagctaatctctttactgctctttctctctttgttgatgttgcaacagccattttgtatccattttcctttaaaaaagagattagttcattgactcctaatttgataggagctcccttcctctccataaattcaatcatatttttagttttttcgtcatataaatctattattggtacagaactatcgtatatatctgtaagaccttctattattcctttacgatttcttcccataactgatgtataaatttccttagtcatagtatatccatacttttcaaacgtctccatccaaaattcaagagaaattctctctgagtcaaacaaaactccatccatgtcaaaaataattccttctactttttgcatacaattcctccaatattttttgatataattatattacactttttatgattaattttacaaccctcaatttatccaattctaatattgtaaaattgtaattttcaaaagttacgctttggtttactttaatatttgaaccaagcatataggatatccacccacctatactgtcaaatccatcatgctctatatcaagtccaaaatacttattaatatagttgatagattcagttccatcaactaagtaagaacctgctcctattttcttaatatgagtctcttctttgtcaaattcatcttgaatttctccaactatctcttctagtatatcttctattgttaccacaccagatgtaccaccatattcatccacaactatagcaagttgaagtttttcctttcttattctctcaagagctttatctatagttaaattttcagatatatatataatatctctcaatatttcttctagttcaattttattttcatttatcttttgattgtataaatctcttatatgtacaaaacctaatatatcatctttattttttctgcatactggatatcttgtaacaccttcctcttttaaaatagctaatatcttttcttcagaatcactttcatatatacataccatatcagttctaggaaccattatctctctaattttcttttcttcaaattcaaaaatattatcaactaatctttgctctgattcatctataagtccacttttataactttcttctactaatagtcttatttcgtcacctgtatggggttcatcaacctcatcagcttgtgaatatccaaatggtttaagaaataaatcagtacttaagttgaaaaaatatattattggatatgttaacttataaaatcctactaataaaaaagatgtactcaacattattttttctgtattataaagtgctaaagctttaggaaccaactctcctattacaacctccatcattgttataattaaaaaagaaatggaaattgatatagtatatataatactttcactaagattaaatacacttactattggtaaaattaactctttaactgtagattctcccatccaacctaatgcaagtgaacaaagtgttataccaagttgacatgcagaaagataggaatttaagttgtcttttattattttacatctttttgcattattattaccttcagttatcatggtatcaatcctagaactacgaagttttaccatagcaaattcacaagctacaaaaaaagcatttatcaaaacaagcattactataagtgttacttttaataactcccgcataaagtattggttcttataatgtaagaaatctataagaactcaaagttccccccttatatttataaatttaatttataatatatattctatcatatttattaatatatcctactttattacaaataatttttataaactaaataacccctttaatatttatgactgtctatttgataaatattaaaggggttatttagttatcattttttatttctaaaaatcttttctcaaatgatttagttatctatttatccaattttttacataatttaatgattaaaaatattaattttttcactataaagtataaatattttttgtataaatattatctgattattaaaataaatattaatactataaataaaaacgaagcatgatttttatttaaataaatcccaaacttcgtctttacttacttagatatttatttactttctaaatcctattatttttaaaaccttatctttttaatacttcaccacatttattctcagtaatctctccattttctaacgcaatttttccatttacaattacatattcaacaccattggctagtaattgtggctttgaaaaatcaatatcttctgacctagaataactatagttatccatgtcaataactgctatatcagctatcaacccttctttaataatacctctattttttattttaaattgcctagctggtaatgaagtaactcttcttacaatctcttccaatctaacaccagactttctgtacatattgaagaaaattggaaaagctcctcttctttgtagttcaaaccatgacatatccccacccacactaaacaaacaatctgaaccaaccataacaaatggattatcaattattttattatcatgtagtttatctgggaaatcagctctatacattcctcctaaacaaaagataagttcttcgtctccatctaaaagtaaatcgagtaataacttgtcctcatctattcctttttgtgtagctatttcacgtattgatttcttttccatattaatatctttagtgtttagaagtattatactccccctatctccaagtataaatgcttcttttaatataagtgttcttccctcttcatttctaagatcatccattaccccatctatacctaattcaaatagactagatgatattgccataataaattgaattactctttttttcttcatacaatgcccagaacttcttggtactgtgtcaaccattatttcaacaccattatacctagcctttaatatctcatcaaatgcttctatttcaactggacttaagtgagatacttgaaccctagcaccacttttttgcccaacctctatggcttcttttactgcattatatcttcctatgtaatctctaatatgagatgtatatataccatcatgctctttaatctgccttgcaatatcaacaagttcatcaatatcagcatacttacttggtatatatgccaatccagtagatattccaaaagcaccacttttcattccatcatttattatatctgtaatttcatttttttccttttctgtaggaggtctatccttagaacctcccataacactccatcttatagtcccatgccccaacaagaatcccatattgacagaaataccacttttagatataaggtcacaatattctgtaaaattattccaacatttatttttatctataagatactttttttcttcttcaagtaatagaccatttttatacatatattcatatacattttcagaagaatatggtgttatagaatgtccacaattaccatttatagttgttgtaactccttgttttagaaacttttcaaatttaccatctagtattgctactatttcttcatgaacatgagggtcaataaatccaggtgttataacttttccacaacaatcaatctctttatttgtattgctatttatcttagaatctatttttgctattaagttgtctttaattgctatatctccataaaaaccaggattacctgtaccatctattataaatccattttttaagattaaatcatatatcaaaatattccctccttaaaaaccaatttttaaataatcttaatgtaatttttatatttgaaaatcaaattattatatttcatatttgaaaattcactattatttcattgtaattagtcactaagcttatctttatacatagctcttgcaattaatatagtaccaaatacacatataagaactactagagactgtggtattataccttgctttgataatataatagtcaatacagatattacaattgctactagacctaattttttatcttgtaaaaatacttgtccaaaaactgacccaaatagagctggtaaaattaagtttaatttttctactacttcagctggaattttagataatacgcttcctcctaaaattacccctatagttagtatacttatattcactaaaatagatacagctattcctattgtagatattatcgagccttcttctgtacctgattcaacttctgctgccttttgagctgctattgaacatggtagcctcatattagatatattaccagaaagaaaactcatataagttcctgggatacctaagattggtgaataagaaactggttctattatgtaatttggagcactcatactgacaattgccattgtacttgctaataatgctgatattggaggcataataccaaatccaaagctcaaaattattccaggaactaatgctgctataatacctaaagatagtgttagtcttccataccttatcataaaaggtaaatattcttcattgtatatagattttactttactcataaaactccccccttatattactgaagctattatcattccgctaaacattgatattgtaagcccccactctcttaaccattttatatttttcttcttttcaagcatacacaatattaccattatagccattccacttatacatgcaattgttccattatcaaaacgcaacaccctatcagcatttagatatgcaaatgaacccaacattgctcctagagatattattggtataaatgatttcttgccactagatataacattggttatcttatctagtttatgtccaaatagtaatgtgaatattatccatcctaaagaacctaatatcatagtccaaactgcatttgtaaatgcaagttttgtcatttcaggagaacctaaagttatacctaatgcatctgttccaaatccagctgacattgattcaaaaattacagaacctataaatgataatctcatccatgctataggcccacccatagttactataagcgataccattccagcaaatatagtcattgaaggcccaatagctgaaatagcactactcttaacagctgactttatttgtttatctgttattcccattgttttaccaactttgcaagattttatagcaaatataagggattgtaccactactattgatactgctactgtactcgctatccacaaaagtggatgattagctaattttaaataatccatttataaaacctccctataaatcctcaaattttattaatatttctaatatatctatttccaaacctgttttagtactctaagtatatttccacctagtaccttctctatttcctcatcactatatccatgctttactaaatatctgacaatgttttttgaagtttctgttgggttctcaagaccttttacatattctactttgggatgttcttttgtacctgttattttttttatatcaaatttagcagctagtactgagtgtaattttacatggtcgccatatactgtatctggtccaaaagctacatggtctattcctactaaatttttaatatactcaaaatgttccataaatgactctattgaatgttctttattcttctctgttattgtagtatgaggtgctgcttctacacctataacccctccttttttagcacatgctattaatacttcatctggagttagtctctttgtgttccataaatttcttgccccaacatggcttaatattattgggtccttgctatattctattacatcaagtgtagtttgaactccaacgtgagagcaatctattgccattccaattttattcattctttcaacagctttttttccgaaatttgtaagacctccatctttctcttcttttagtcctgaacctaatgcattggattcgctgtatgttatacccattaaccttataccaaatccatacagtatatctattctatcaagttcattttctattggtgctgcaccttctaatgttggtatcaatgctactttaccttcacttttagctctgcatatatcttctactttttcacactttatgacaaaatcttgatgagctaaatcacatagtctcatgcctaaatctattaatatatcatcccatttccaccctgaatttgatgttatcgtacatacaccatccattaaattatcaaatatagcatcataatatcctcttgataatgcttcataagcgcatctttgtttaccttccctattatattcaaatatatctctttctaggtgttctggaaataatactggatgttcatgtaatgatataaatattttttcatccactatacttttaaccttagcttcttgaatatcatctaattcaataaggtactctttaactcttttatctcctttacacatctcaatagatgaaatatcttttcctttttctaaataactataggcttcatatcctttgtaagctgacttcataacaacatcctccaagttctacaattttttatatttttcctatgtagcaattgatatgccaaaatataaattttaattgtataataaatcttgcaaaaaataaaaacagtagtaaggttgatatttactactgttttattaaaaataatcttcttagattatttattcaatatttttgaattatcttaatcttaaagataattttatttatttctatccattatagggatttttttagggtgttttgcctttttagtcccctatatcactcccttaatttttacatatgatataaagttctttccttcatcagttataaaactaccttgtttttttactccagataaaagtaaaccatggctctttaacttatctattctttttctaatttggtctacacttaaaactatatctttttcttttaaaatctcttgcagtttatttcttcctaataatatatttttattattccaagtttctatactgttcaatatacatatactttcctcaaagaaattagattgtttgaaatctaagataattgaatcgaaattttcattaactaaagtattgtttttttcaaatctaaattgttctggcaaatgctcgtaatctactctatcttcctcaactatagtatcaatataataaattaaatttttaagctctcttacatttcctggccattcatacaatgttaaagcttgcattgattcctctgtaaaacatttgttgctatttatttcatctaaaaaatacttacttataagaggtatatcttccttacgttctctaagtctaggtatctctatatgtaatacattaatcctataatacaaatcttctctaaaagaaccttctttaatttttttctttaaatctttatttgttgcagctataattctaacatctattggtataattttacttccgcccattctcataacttctttttcctgtaatactcttagcaatctctgctgtacatctaaagatatatcacctatctcatctaaaaaaattgttcctgtatgcgctctttcaaatatacccatttttccaccttttattgctcctgtaaaacttccttcatcatagccaaaaagttcactttcaataagtgtatctgacaaagaagatagattaactgcaacaaatggcttgttttttcttagagattcattatgtattgcctgggcaaatatttcttttcctgttccattttctccaagtatcaacacagaaaagtctgtagttgctatttttcttgcaatattaattttttcttttattattttactctcacctacaacactctcaaatgtatactttgatacaaaaccttttgactgaagtttattttgaatcttgtcctcaagcacttgaattgcacttatatttttaatgcttataatactctttattcgttcattattttcataaacatttactttattaattatcagttttttgttatttaaatttactacttcatcattaacttcatcttcttgaaaaaatatttttttgacaaccttatcactaaataagtccataaagttattagatataatttcattttggtctattccaactagattagaaaatactttgttgcaatatataaattttcctaatttatcaacagaggcaataccttcatctataatctccaaaaaactcttcatggttttattcatagttgtataatacctatatccacttactgtatcttcattgtatttttccttaataatatgtaatttatctatagatatatttagttttgtaaagatttctataactgtatttatatcaattaccttatcacctatgtcaattatttgctttatgttttgtggtatgctgtttctgcttcccgtaataattccaatctcacatttagacttatcacaacctggataatatggtattagattaatatgaattaatcctagttttctaattatcttggcagtttcatctgctgactctttataagcatctataaccataacatcagaatcattttctatacttattatctgatttatattttcaatatttatagtacgatgtactattacaataagtatatttttatcaatattattatgtatatattcctttatatcattgtctgaacatactacaagctcatagcttgacagttcaatatttatcctatttacatataccaagttatctatattacaaaattctccaaatatattttccaattgttttgatatatctatatttattttgtcatcagttgatacaaataaaatattatgttttttcatagtcccacctcctgtttaacgagtatagaaagtaataatttggtctattgtagcactttttaaaaaagttttaaatcttaaaaatcaaattttgtaccatttactattattttccataataaaataatgtaagctatcttttttcacatataatttaatttctaaaacggttagtttgacattattggaatataaacaaaaatttaatataaattcgttaatatattaatacatttttaagaatgacaaggaataaattataacaaattttaggaatatataataatagggtctcagaacttagttacaagttctaaaaccctatttgtttagtgtaaaaaacatcataaaatttagcttaaatcttttcacataatattactctttttctaagtgataataaaatatatctattcctctaaaaactgtaaaaattcctgattaaatagtttaagctcatcatagaatatagcatgaccactatactcaaaagtatataaaattgaatcttctattttttcattcataaaaactgcaaattcatacggacatatttcatctaatttcccatgaaatataccagtaggcactcttacacattttaaatcattaaataattcttcatctcttaaagatacagcagttccaatagtgccaatacctgatgcactaaaaccaatatcattaaaccatcttctaaagctttctggtggatttgatgcaaatactttttctccaaaatcggttaccatttctggtctatcagtacatgcttgtgctatcaatttatttacatcttcacgtgtcataccatatggaaattctggaggtctttgtacaaatgatggtgcagcagctgcagctaataccaattttgacactccatatccattaaataaactcatatacctaagtacgattgctcctcccattgaaaaaccaacaaaggtaaagtcttttaatccaatagcatgtaccaccttataaatatcgtctgctaattggctataagtatatcctcctgatgttgcatcagatttaccaaaacctcttaaatcaattgaaactgttctatatccgagttttggcaatatatttgtttgatattcaaatatcttatgtcctaagggccaaccatgtataaaaagtacagtttttttagcactcggattcaaatcatatactgctatgtttatatcattcacatatacataatacatatcaacagcaactcccttcaagaaaatgtatgatggttattttatatatatgaataaaatgatgaataactaaatttttaaatttatttacaatacttctctattgccttttcaaataaacttacatgaagtttttcatctaggattattctatttaatatagcttttatataagggtcttcaataagacttatatctttataataattattaatagccacatgctccaaatgcaaatctagttttaatctgttacaaatagaatttccataacatacaaaaccaccattccaatatgcaccacaagaacttgtagaacctctatatacaggatttccacccaataatcttatagtctttgctaatatctccatatgtaacatttctgttatagatatatttatccacatttcacttaactctctatgcgtttcatctaaatcaaaattatggtatagatattgatttacactcgtaaattcacttgatactccggcatagtcatccatcaataattctgcataatacttatttagacctaaaacttttatctctggatatggctcatcacttgaatatccatttcgcttgtgcatgtcgtaatgtgcatcactcataatatctcctcctttaaatttaatacttgatattaattgtatgcatcacgactttttcatataacttagataataaaatctattatattattttctattataatttatgtgtcaattcacccaaatttatttgatatgcaatatttctttccttagtgctacatatgtaataaaaacatatatacaatatattactacaaaattaataagcgtaatggctacagcatgtaagataggaatctgaatattaaaaaatactggagcatcaaaagaaatattaaacatgttgtatgaaaaaactgataccaatattccaccaaatattactgcaggaattaatggaatcgaaaaatataaacaaacatgtttctttaagatttttattacttcactatcaatcatccccaaagttcgaagcattccatagtgttttatgataatgttattttcgctcaataattgaatagagagaatgactgtaccaataatgcatataatgagtgccaaataaaaaagtggtaatatcaagataatggcttgaccagtagattgcatagcatactttccacttatataatccttattatcatatcgtaatttagaaacaaagccttgattacctgctactactactccagaattaagattttctaaagtatcaaactttttctgaaactcagtaaaataagcactatccaaaggctcacttgtaatagcaacataaagactatacagaggtttcatattatcaattaaataatctggaatgacaataatatattcttgtccatttccatatcctccatactgtgaaaagttctctatataaatacctgcaatacttaagtccttatctgatattgtcagtttatatttttctccaatataattcttatatgcatcagcaagataaggcatacaatggatgataaattgatttttgtccatctttattgggtttaaacccaacatatttcttagtatattgtaatcactatatttcataaatgtgtcaaactggttttctgcaaaagtataatccttatattgtaaatctcgccctatatctttcaagtatttagaaaggatattattacgaaccttcataaaggatgttttttcttctgtgtaaagagtataagaataatcctttttcacacctttcgtttctgataaatatccttcatatgaagaaaaatcatatgattcattcgggtgaaaaatactcacatcaaattgttgtaaatccactgatttattcatcacagaataaaatgagttagctattccaatacaagcaattgatactgtaaaaagagttgcgataatacccattataatgcttattccatttatctttgaagccagtagacgatacaaaaataagtgagatttcttatatttccaattcatccctttttcaaacatattctgtgcaatagatccaaatcccataaataatacgattagacaaaatacaatcaacaataaaccaagaaatacatctgttaatctaccactaggtattgaaaagaaaaaaatacccatacctccacacaaaacagacacacaaaacataatagacttcgtttttgtttggtgaattaatacattttcattatatcgatcataattaagcaaattaattaatttcattttaacaagttttttattactttttaattgagcaattaaatatattatgcagaagtataaaaaagtcatcccagcagcttttaatgaaaaatccggagataaagaatactttccatgaaacatattaataacaatagattccaaaaccttagaaacaaatatccctagaatccatccaacaataagagcagaagcacctaataaaagattctctataaaaagcattttaacaatttgttttttatctactcctaatatcatataagtacttatttctctgcttctttttttcaatataaaattcatcatataactaacaaaccagcctaaaataaaagtaataatgaacgaaaatatgataatcatataagaaaactcatcgcttcctccattattaagtatactagaaagttcttgcattacgtcggaaaatatcaaagcgttaaaagcataaatcaaagctacagagcctattaaggaacaccaataaataaggtactttcctgcttgtcgtcttgcattacgaaaagataatcctttcaacataatcaatctcctcccatcaaagaaagtgcatccaaaatttcgtgatagaaagtaagtctggatttttctccttttctaagttcgttaaaaattttcccatcccttagaaataaaattctctcagtataactagctgaaatagcgtcgtgtgtgacaagaagaatcgtagcctctaatatggtgtttatagtttccaaaagttccattaaagttttagatgaattagaatccaatgcaccagttggttcatctgccaaaataagtttgggctctgttacaactgcacgagctactgcacaacgttgcctctgaccaccagatacttcataaggaaacttcgaaagtatctcttcaattttcaattgtgtggcaatattatacacactattagtaatttcaacaggagaaactttttttattgtaagtggaagtgctatattttcttctaatgtcagagtatctaataaattagaatcctgaaaaacaaaacctaaattatcacgacgaaaaacagttaagttttcttcggatagttcagtaatatcttgattttcaagataaatttttccagcacttactgtatcaattgtagcaatacaatttaacaaagtagttttaccagagccagaagttcccataatactgacaaactctcctgtattaatttgaaatgacacatcattcaaggcctttgtaagtattttctgattgccataatatttctcaatgttctctactcgtaatagcatgttaaagtcctccttagtcaacaatttttccatttttaattattattgtcttatctgaaaaattcaagatatatacatatatgctttctttagagtcttgaatttgaatagtaggttcattagatgaaattagagatttttttacttcaatatcgtattttattgttaattcattatcatctccatttttattagtatcttctacatttttatttaaatcaatgttattatgattaaagggaccagtaaactttacttctgtaatagttccattttttctaataaaagaagcatattcagaccttagtggtatgatacttcgtgagaaaaaacccatcgaatccaatcctgtaattgaaataaacaaaacgagtacaacacataatatagttaatatcctttttttcatatgtttctccctcctttctattgatattgtagcgtaaatagtaatctgaatatatagaagttacttaactttatcttacagttttgaaagataaagaaatagcagcgcatttttagttgcactgcttctgcatattgatagctgtatttattgggaaattcaatgttattgctgtgtattcaccaaggctggaggacacatctatatcaattcccattttcttagacagttcataacaaaggtaaagaccaatccctgtagaattgtttgtagtccttccattactgccagtaaaacctaattcaaaaattcgataaatttcactttctttgatgccaataccattatcttttatagtaaacttaacactcttgtcttcttttattgcaaaaaatgaaatttcagctgaatcacttttgtactgaacactattgataataatttgatttaaaataaaaactatccactttttatcagtatatacactatactccaaatcctgtatattaatatgaatattattttgtataagaagcaatttattctttgctaatacttcttctacaattgactttaatgttatttcagaaattaaataatctttttcaacatggccaaggcgagcatagtacaatgcacgctcaatatgacgttctatttcttccatttgaaaacgaatttttcgtgtatgttcatttttataattttcacatataagttctgatgttgtaacaggatgttttatctcatgtacccattgttcaatgaattgtctatattcgtacatttcacgatgtatttgagaaacatgatctgtcatagatttcaatgataatctaataatattgtagtattcacgttctatgttagaagtaggtttttcaatcatttcaataaacagatattttttatccaattcgtctacaatgcgacgtaacttaataatttcttttttctgtttttgataacaaaaacatatccaacaaaataaaattgcgacccaagcggctataagaagagtcaactctccttgaccaatccctataagatgaagatatagcactaatgaaattgcacaacaaatatttaagagtataactaatactttatcttgaagaaaattacaaaacctcatatcctatatcccatcccccgttttgtaatgattaagtcagtaatacctataccccttaacttttctctaagccttgtaatgtttacacttaaagcattatcatcaatatgaatatgattgtcccataaatattctaccaaatctatacgaggcacaatactccctacattctgaaacaaataatacatgatttttagttcagttcttgaaagttctataacagcattttggtattctactgtagctgaaataaggttgagtataatctctctatatttaattttctgtttatctgatgaatctactcttttaagtaggttctttacccttgctaaaagcaaaggtaagttatatggttttgtaatatagtcatctccccccatagtcaaaccatttagttcatcaattgcactatctcttgctgtaataaaaataataggtatagtagaacaattcctaatctgtctacataaagaaaaaccatctatattaggcaaattgatatccaagagaattaagtcaggtgttgattcttggattacttgaagtacatcacaattatttgtatccaatgtttgtgtactatagccattattttcaaagaattgcattaattccttacagatgaacacatcatcttcaattatcaaaatattggttaaaataataaatacctcatttctttagtttatattgctttaattttgtaagtaatatatttttccatatattacttacaaaattactttttaattattcatcttttccagctactgatagctctttaataacaactgaaggtgaacctatactactcattggaaattctaaatcttcccctataacttcaatatctttcaacaggtcaaaatagtttcctgctactgtaatttgctccactggaaatactttttttccttctttgatataaaagcctttggcagctaaagaaaagtctcctgttactgaatttgcacctgaatgaagccctgcaaagctagtaaccatcaatccttcatctatatcctttataatttcatctaaagatttatctcctttatctatataaaaattagttggatatatgcttataggtgatgaatatgaagattttattccatttcctgtagtctttacacctgccttattagccgtttttaagttatgaagtaaagttataagctttccatttaaaacaacttcttttttaaatgtagctactccttcatcatcaaaaggagtagatgccataccattttctaaaagtgggtcatcaactattgtaactataggagatgctatcatgtctccttctctatttttcaataaagataatcctttttgagctgaatctgcattaaatatcccagaaaatgtgctaagcaaagataccatagcttcattaagcaatatagttttatatttacctgatggaatactcttaccacctactttagataaagcattatcaacaccaagttttgatatctcacaaggttttatttcttcaatagaatttgctctattatatcctattccatcatatttttgtccattgtcttctatgataggaactacaaaccctataagcatattagttttattgcttaaattaagacctttagtattagatataccattacttgatacagaataagatatagtacatttagataaatttaccaccttatctgaataagctttagtctctctttccatttctaaagctaaatcaatcaacttatctgcctctaaattttctagctctttagaataagtctttacatcattatagtgcttatctccttcatatataaattgtacatcttcattttcaatagtgtttactccatcttttacattttttatcaacatatcaacagctttatcatctaaaatttctgtataagaataacctatctttccatttaccttacctctaaaagataaaccaaaagatttatcaagattgtatttctcaacttctccttcatatatatttatacttaaattttctcctgtataataatatatttcacactcttcaaaaccttcacttagagcctttttaaataatatatctttaaaatttttaagttccacaattatccctcctatcttccacctacagtaatttcttttacccttatcataggttggcctacattagttggtatacttcctgatgatgagccacacatcccctgagcttgttttacgttattcccaaccatatctatattcataagtatatcgctaccttttccaattaaactagcacctctcactggctcttgtatttctccattttttattaagtaaccttctgaaactgcaaaattaaactctcctgttacaggatttacagaaccaccacccatttttttagcataaagtccatctggtattgactttataatgtcttctggtctatcttctccagcagcaatataagtgttagtcatccttgaagttggtgcaaatttgtagttctgtctacgagaacttcctgtaggattcattcccattcgtctaccattaagtttatctatcatataagacttcaaaattccattttcaatcagtatattcttttgagttggatttccttcatcatctatattcatagaaccccagtagtttggtattgtaccatcatctatagctgtaatctttgtggaagcaatctgttgacctaatttatctgcaaatacagagttcccctttgcaactgatgtagcttccaaagaatgtccacaagcttcatgaaatattactccaccaaatccattatctattgctaccatcatattacctgcaggacaatttttagcatgcaacatagtatgcgctactctagctgattcttttgcataatattctgggtctatttcttcaaatatttcaaaccctttacaacctccaggaccttcaaatccagtttgattttcattacccttagatgcaattgaacttatccctagtctggttcttattcttctatcctcaacatatataccttcagtgtttgcaattaatattttttggtctttatccaaatagctaacacttacttgagatatatcattactaaattcttttgcactcttatatgcaaccttcataacacttactttatctctatttcctattgaatttggataaatttttatattatgtatgttatttattttaatactgtcatttaatattacactttttccatcttccaatttacctaaagcaacagcagctttgtatgctacatccaacagactatttaatgaattgtcacttgtataagcatatatactcttcaatcctttaaatattcttattcctataccataatttcttccacctattgcattttctactttattatcaattaaactaatagaattatttatagtgtcttcttcaaaaatctcagcaaaatctcctccagtaattagacacttttctaataccttagaagctatattttttgaaagcataaatttacctcctactttaaatttttaattaacttttattcaatctttttacttgttaacaaacattatatactatattacttaaaataaggtaattatgaatatattatacatatgttttatactaaaatgttatcacattttatctatacatacccatataactagataattaaaatgtataatattatttgctatagaaaataatacactcatacataataaattttaggagtgaagtatatgaatcaagaatatgtaaaaggaaatcctatttttactaatattaataaagttccaagacaatttccataccttactgatgatattgatactgatgttataattgttggtggtggcgtaactggatgtatttgtgcttactatctagctaaaaacaatataaagtctgtcattcttgaaaaaggaaggattgcacatggaagcactagcgtgacaacttctctattacagtatgaattagatgacaatttgatagatttaacagaggttatgactctaaaagatgctctaaaagcatataacctttgtacttcagcacttgaagaattagatacatttataaagctatatggaaataagtgtgattatgccaaaagagatactctactttatactgccaacaaacttgaaattaaggctatcaaagaagaatataacttaagaaaagaaaatggatttgatgttgaatatattgatgaatccacaaacccttttagctttgatttaaaatcaggattgatagcaaagaatggaggacgagaattagacccatataaatatagtcaccatttgattgatgtaagtttaaaaaatggtcttcaagtatatgaaaatacagaagtaaaaaaagtagatttatcaaatgataaggttactgctgaagtatcgtatggatacaaagttcatggtaaaaaattaattgtagctacagggtacaatacaagtttatttacaaaaagaaattttgcaactaagtcaaatacttttaatatagcaactaaaccacttaaaaacatagcttcttggaaaaacaacattttaattagagataactgtgacccatataattatctaagaactactaaagacaatcgattaattataggtggtgaagatgtaagttttgatgatatagaaaatgaaactttagccaatgaaaagtatgatattttagaacaaagattgaaaagtatgtttaaggatataaaagacattgaagttgaatataaatattgtggttgttttgcttcaactttagataatttaggttttattggtccagataataaaaataacaatctatggtattgcttaggttatggagcaaatggtatactctttgcaatattaggaggtataatgttaagtgaattatatcttggcaaacaaaataaaaatatgaaattatttaaagtagatagatttgataaatagatattgtatattaaaagactataaaaagatgaaactttataattctaaaagttaactttgatacagtcttttataatgttccttttaaaaatactttatttataattaaatataaagtaaaatgttaaaatataactgataaaatttagtcataagataatatttaagtttatttgatgaaatatggaggaattattatgaaagaaatactcgttattgctcccactaaaggaacctatgaaaaatcaattcacatagttaaaaaaaacaaatatacaaatattgatgttgtatttggcaatctaaaagaaggtatacctcttgctgaaaaaagtattaatcatggtactagaattatcataagcagaggtggaacttacaatatgttaaaagctacttacaatatacctatagttgaaattaaagtagatgcttatgatattataaaaagttacaaagaggtaaaaaattccaacgaaccatttggaataattggatttaataatgtcatctacggtttcgatattatagaagaaatattgaataagaaaataactatgattgaaattgaaaaagaagaagaaatttatgatgctatagaaaagtacagaaagaaaggtataaacacatatataggagataccactgttgcacatattgttaagagacttaattgtaagggaatattaatcgaatctagagaagaaaacatacttagagccattcaacaagcagaacaaatactcgaagcaaccaaggatgaacaaaaaagaagattacagatagaagctatgacagattttgtacatgatggaataataacagttgataaaaattttaaaataacattatttaataagagtgctgaaaaaatatttggtataaaaaaagaaaatgcactttatcataatgttgtagatgttatcccaaacacagttcttccacaagtagttgagactatggaacctcaaattggtgaaatacaaaatatagggagtacaaaaattattacaaatagagttccaataattgttgatggccagattcaaggggctgtttcaacatttcaagatagcaaggagataagttcttttgaacatacaataagaaggagcttattaagcaaaggtctatctgctaaatacacttttgataatataattcatgctagtgaaaagacaaaagattgtatagaacttgcaaaaaaatatgcttgttatgatactcctatgattattactggagaatctggagttggtaaagaattattttgtcaaagtatacataactatagtaagcgtaaaaatgcaccttttgttgctgtaaattgtgctgccatacctccatctctaatagagagtgagttttttggttatgaggaaggttcatttacaggtgctagaaaaaaaggtaaagcaggtgtattcgaactagcacatgaaggtacaatcttcctagacgaaataagtgaaatccctcttgaacttcaaggtcgattattgagggtattgcaggaaaaacaagttatgagaattggtggtgataaagttattcctatagatgtaaaaattatctgtgcttcaaataaagacttaaaaaatatgatgcgcaatggtttatttagacaagacctttattttagaataaatatactaacattatatcttccttcattaaaagaaagaaaagaagatattataaaattatcagaattttttatacataaatattcaagcaaatacaataaaacgcctttaattatcactccaaatattaaaaaggcacttcttgaacgagaatatgaaggtaatataagggaattggaaggtatgatggaaagggctgttattgtggaatcatttgactcgattttattagaaaaggttagcaatgaatatacaaataatatagttgataaagataatagtgattttgaatgcagtaatttagatttaaaaactttagaaaaaaaatatatctataaaatttataacgaaaataatagaaatactacaaaaacctgtgaaattctaaagataactcgctccactctatggcgtaagttaaaagaaatagaagatgatgtttaaaaataatacatacctatatatatcaaaacgttttatgtttaattttaatacataaggcgtttatttgttttcaataaaaaatacaattatatgataaaaagaatctttgtaagtgaaattctcatcaatcatacctttaattataagtaatctacagcatttcaatcgattattaaaaataatcatgataactaaaaatacaaactctatatattggcatagtaattgcttttataatacctatataaaaatgaaagggagtgatactagatgcacatcttaaaatcagtgaaaaagataccaggaggacttatggtctgtcccttgttattgggagcactatttaatacagtatgtccacaagctcttgaaattggaggattcacaacatccttatttaaaactggtgcaatgagtatacttgctctattttgtctatgcaatggagctcaaatcaatatcaggcaagctggtaagccattgactaaaggtatagtacttacagcaacaaaatttataattggtgcagtattaggtattattgttagtaaatttattggacctaaaggtataattggtattacacctcttgccatagttgctaccatgactaattcaaatggaggtctatttgctgctcttgcaggtgaatatggtgactccacagatgttggagcaatatctatcttatctctaaatgatggtcctttttttacaatgcttgcttttggagtaactggacttgcaaatgtacctatagtagcactatttgcagcacttataccaatactacttggatttatacttggtaaccttgatgaagatatacgagaatttcttgcacctggtacaacattattaattcctttcttcgcttttcctttaggagcagcattaaactttaatcaaattataactgctggactacctggagttgtacttggtttaggagttactataataacaggtatgggtggctactttgtaatgaaacttatacgtgcagaacatccagcagtaggtgcagctacaggtacaacagccggaaatgcagctggtactcctgaagctttagcagctatagaccctactctagctacaatagcagctgtttcaacagtacaggttgctgctgctattattgttacagcaatatgttgtccaatgttagtttcctatctagataaaagagaaaaaaagaaaaaatctatttttaaaacaaataaaaatattgaagtaaattaatacttaaggaggtaaaattaatgaatgcaattattcatgcaaatgaaaaagataatctagttacatgtgtcagacctttagttaaaggtgaaaaagtttcaattgatggaaagtcttacatagtaaatgataatatacctgtctttcataagatggctacagaagatgtaaaaaaaggtgatgttgtatacaaatacggtgaaattataggaattgcaacagttgacataaaaactggtgactatgttcatgtacataacattgaaagtacacgtggtcgtggagataaaaaataggaggaagttaaaatgaaattaatgggttatttaagagaaaatggtcagtttggtattcgtaatcatgttttaattattccaacatctgtatgttcaagtgagacagctacaagaatagcatcacttgtgcctggagcaatagcaatccctcatcaacatggatgttgtcaaattggttctgatatagagcttacagcaaagacattaataggatttggaaaaaatcctaatgttgccgcagttttagtagttggtcttggatgtgatggtattcaagcaaaagaattagcatctgaaatagctacaacaggaaaaaaggtagattacgttgttatacaagaatgtggtggaacattaaaaacagtttctaagggaactgaaatagtaagtaaaatggctcgtgaagtatcaaaagaagtaagagttgaatttggtatgagtgaaattacattagcacttgaatgtggtggttctgacccaacaagtggaatagcttcaaacccttcaataggcgttgcatcaaaccttcttgtagatgaaggtggaagtagcatactaagtgagactacagaagtaattggtgcagaacatttgttggctacccgttttgaagatgaagaaatgaaagataagtttcttaaatttgtaagtgatgtagaaaaaagagcaattgctatgggagaagatttacgtagtggtcaacctactccaggtaataaagctggtggactttcaacaattgaagaaaaatcacttgggtgtatgtataaggcaggcaataagccattcaaaggtgctcttgaatatgctgatattgtacctcctgataaaaaaggattatattttatggatactccaggtcaagatatagattctatcactggtatggtagcaggtggtgcacaaattgtaatcttttcaactggtagaggtactccaacaggaagccctatttcaccagttattaaaatcactgggaatagtgatacatacaacaaaatgccagacaatatcgatataaatgcaggtagaattataacagatggtgctaaaatagcagatataggtcaagaaatatttaatgaaataatagaagtctgtaatggtaaacataccaaagctgaaagtcttggtcatagagaatttggcatttacagaatttcatctacattttagattgtaacaaaatatcttttataaatataatacttatgtagatacataagctaaaagttctttctaatcctataaaaattttctatactgaaaaggaactgtatcaaaattattttgaaaacagttccttttttaacctcttttactcaaaatattataaaataagatttaaacaataaacgtgtcttgattaatctctaagaagacataaataaagctaaatgtaaagtgagataaataaaatttaatatctttgtatgaaaagatatttggtataatatgtctgagagaattcttatttgtaaacaaataaaggatggaggatgaaacaaaagaatgaactttgaaaacacaaaaaataaaaaaataatagctactttactattgacactccttttaatcgtgtcattaacatgtgtcaattttattatgaatctaaataaagtaacacataatgaaacagaacgatatcttgtagaagtttcacaaagtatttccactacaattaatgtgaaatgtaaaagtatatttaggacactatattctatgggagatacttattttgagattaatgatagtgaaaaagaagtcaatagatacttatcaaaaaaattaaaattatttgaatttgattggttaggtattatagattctaatggaaattttgtaagtgcccttaaagatacaggtaatgttaaaggacaagacttttatagaaaagcccttcaaggtaaagaaacaattactcctgttaaatcacaatctggtacatatggaattttatattctgtaccactatacaatggcgataaaattgttggagctgttgctgcttggaatactattgatactatgagaaatttattaagtgtagaaagctttcatggtgaaggattttcccaaattatcgaccaagatggaaattttattgtaagttcagcaaacaaaaatgctccaaaaaatgtggtaaatttttttgacatgattaaacaccaaggaaaacaggttgataaaaataaacttgaagaaatgaaaataaacttaaaaaagaacaaaactggttctatgtattatacattaaatgatggtatttctaaggcaatgcattatcttccattacaagaagaaaacttatacctcctttcagttgttccaacaaaaacagcaagtgcacagtttgatttacttctaaaaaaagcaatcttcatcaatattttaattgttatactatttttattgcttattatattgattatgtttataaatcaaaagaacagggcacaacttataaaaatcgcctatgtagactctgtaactaaaggttacagtaaagcacgttttgatattgaagctaaaaaaattatacagtcatcttcatcagaaagctattcattggtatctataaatattcagaaattcaaacttattaatgattcttttggtagtgaagcaggagataaaacattaaagtacatacatgatgtcattagtaattatctagaaccaggagaattgctttgtcgagtttctaatgaccagtttaatgtacttattaaaactattcctcaaaaagaaattcttaagtacatagaaaatatcaccaatgatattaatagtttcaataaaaatgaagaatgtaaatattttatagctctatctataggtgtatataaaattgatgacccaaatctacctttagtttcaattcaagaccgtgcaaatgttgcacgaaaaaataataaaggaaacattggaaatcatccactttatacatgtgttttttatagtgatttagagcgtttaaaaatgattaaagaaaaagaaatggaaaatagaatggaggaagcattaaataataacgaatttatagtatatcttcagcctaaaataagcctcaaagataatactattgtaggtgcagaagcattagtaagatggcaagacccaaataaaggccttataccaccagacgagtttattcctttctttgaaaaaaatggttttattacaaaactcgaccactatgtttttgaaaaagtatgtagtatgataagaaaatggatagataatggagaaactccaatgcctgtttcagttaatttttcacgtgctaatttaaataatatagattttttagaaaaatacagaatgcttcgtaataaatacaacattcctgctaagctcttagaaattgaattaactgaaacacttgtatttgaaaatctccaaaaattaattaatataatagaccaaatccatgaagaaggttttcaatgttcactagatgactttggaagtggatactcttcactcaatatgttaaaagaaataaaagttgacacattaaaacttgaccgtgctttttttagctcacctaatgcagataatattgctgaaaatcatgtaatagaatctatagttaatttggcaaaaaaattaaatatgaatagtatatcagaaggtgttgaaacaatcttgcaaatggattatcttaaaaaaattaattgtgatatgatacaaggatatgttttttcaaaacctctgcctcaagaaatatttgagaaaatgacttttggaaaaaaactagaagaaaccagtatggatagttccgtttaaataaaataaaaaacttgtctctataaaataattttaatcattttataaagacaagtctttttattttccaatttaattttattttctaaatttcttatactcggcttgttttaaattccctttttaagaataataatacgattatcatagcaataaaatctgcaactggctgtgccaaccaaacaccatctaaattaaattgaattggaagtacaatgattaatggtataaataaaataaattgtcttaaaagagttaaaaacattgaatgtttaactttacttatacactgaaaatacacaggtcctacaatagaaatccccattataggcaatgtaattagatttatgcttatacctcttactgctatatccatcaaatctgaatctttattaaatatacctacaaatacttctgggaaaacttgtactattaaaaatccaaatgacaatatgacaactgacactatgatagataatattaaagttttctttgcacgttcatattgttttgcaccataattgtatgatattatagtttgcataccttgattcaatccaaacacaggcatcataaacatcaataaaatagatgtaagtgctgtcatagccccaatagctaaatctccaccataaacctttagagaattgtttgtaaacatgtgagttatacttatagctacttccatagcaaaaggtgtcattcctattgcaaataccttctttactatatctttattcaattttaagttacatttttttagttttaaagtggacttccctcttataaaataatatgttacccaaaagaatactactatttgacatagtactgttgctatagctgctccttttatacctaaattaaacacaaatataaatatagggtccaatatcaggtttaatacacatcctacaatcattgtccttgctgctaattttggattaccttctgctctaattgcattattaagagaaaatgcaactaaattaaatatacttccaatcaatatgacactcatatagtcttttgcataaaatattgaatctttacttgcacccaaaataaaaagtatatcttctaagaaaactaatcctaatatagttataattaaagagataattatagataatgtcaaagcattacctaatatcttctctgcttcttctctatttctttcccctaattttatagacaatcttgtgctagcacctactgataccaacattccaaaagctattattagagtaaatactggcatagttacaccaagacctgcaatagctatagagccaataccttccatagaaccaataaaagctctatctactacattataaagtgaagttaccatcattgctattattgccggtatcgaatacctaaataataaaatccatattttttcatgtcttaatgcttcttgattctccatgttgtcaccatttacaccatgtcataagttatacaaattggtttatttgttcttgggtctgttgctatttctgcatcaatattaaataattcttttagattatccttcgtcataacatcatatgcatcaccttcacaaactattttacctttcttaatacctatcatgtggtcagcaaatcttgctgcattattaagttcatgtattaccatgacaatagttcttccttgttttttatttagttcatctaataattttagtatctctaattgatgtgccaaatctaaatatgttgtaggctcatccagtaataatatatcagtttcttgtgccaaagccatagctatccatgccctttgtctttgtcctcctgataaatcttccatatttctatccttaaattctgcaattccagtaacttctaaactccaatttacaatctctctgtcttctttactagaattaccaaatccacttttatgaggaaatcttccataagaaattaattctgaaacggtaagaccactaggagcttgagggctttgtggaagtacagccatatcctttgctatttctttagacttctttttgtagatgtcctctccatttatatatattttcccactattagggctaataattctacctatagttttaagtattgtcgattttccacaaccattagcccctatgatggtagttatttttccttttggtatatttaaatttaaattttttataatatctgtgtttccatatgatacatttagattcttagtatttatacagttcataacaacaccctttcctaatcatttaccaacattaaataaataaagtacggcactcctattatagaaactactatacctactggtatttctataggtgctagaagatttcttgatatagtatctgctattaaaagtaataatgttcctatcaatgctgatactggtattaatcttttatgctttggtcctattatttttctacctatatgtggagctattaaacctaaaaatgaaatactacctgctactgctgtcgatacaccagataaaattactgcatatattataagtcttcttctttgtttttctacatctacaccaagacttatagatacttcatcacccaaatttaaaacatctatatatttagatttataaatagttatacccataaaaatcactataaatggaagcacagctattacatatttccaactggttccccaaatgcttcctgatgtccatgccataaccctattaaattcttgtgttgtaaatttcaattggaatatcgtcaaaattgaagtaaaagctatgtttacacctataccaataagtagtaatcttgacgaatttataccacctttccatgcaagagaatatataagaaatgctccaaataaagctcctataagtgcaacaataggcattgtaaatacagtcaagttactcataccttcatatacattaccattcataaggtatatataaactactacaaacaatgcagcacctgaatttattcccaaaattccagaatcagctaaatcattctttgtaactccttgaagtattacacctgctgttgataatgcagaaccaaccaaaagtgctattactattcttggtaatcttaatttaaatattgcaatttcatgattacgctgaccctgccctaaaaaagtctttataacatccattggttctatagaaaatgagcccatatttaaactcaataaaaaagtgataaaaataagcaccattaaaattgatataacaagtaatgttttagaatttatttttataatatttttcatagtacctatttctccccctttctaacaaggtatataaatattggcactcctataagtgctgttatagaacctactggtgtctcatatggaggatttatcatcctacttaatatatctgtatatacaagcaatacagctcctaatactaaagagctcggtattatatacttataatctgaacctactattcctttagctatttgaggaactataagacctataaaaataatattaccagacactgacacagatgctccagtcattaatattacaagtactatacatataaatctaacaaagttagttttttgtcctaatcctattgccacttcttctccaagacttaatatagttattcttggagccataataatagctaaaataaatccaataccaccagctacaaatagcaattttataccttcccacttcactcctacaagccctcctgatatccagaaacttaattgttgagataggttaaaatacatagatattgctgatgccaaagaaattagcaatgtaccaagagcgactcctgcaagagctaattttacattattaactcttcctcttgatttagaacttataaaatatataaataatccacttatacttgctccaataaatgcaaacatcattacactaaaacttccatgtataagttgaggaagttttttttgaagtaccagtgatatcgaaattgcgaatgtagctccttgtgtaattcctataacagatggttcagctataggatttctcgttattccttgcattattgccccagaaactgctaaaaaccctccaacaagtgcagctgctattgctcttggaagtctaacatcctttactattctcatatttattccatcttccatttttatcaaactatctatgacagttgatagattcatatcttttgccccaatagttatggataatacaattccaaatacaagtacaactatacttactaatatcaacaaataagttatattttttttactcagcttagtcaattatcctacctccttttcccttttaatcgtcagtataatatcatctattaagtattttaattttaagatttattaaaaataggtgtgaaaaatgaatatcattatctcacacctactaagttaagaattactttgttaattcatttttaactgattctaataataactcttttccaattggattgtatgattgactgaaaaatggagcagcatcaagtattgttacattaccatcttttactgctcttatttgagaccagatagcactattttctaaatcttttttatctgcttctgtagcaattacaactatatggtctgcatctatatctgttaaaccttccatacttaccattggtagtgttattccatcctgttttggcatattcttaggtctagctaatttcatatcatcattgattagagtacctattccaccatcactaaataccataaattgacctgaacttgccaacactggtaaataagttttttctccattcttttctataacttccttacctaactttgtagctttttcatcatacttctgtagccaacttttagcttcttcttctttgtcaaataactttgaaacatcagttaacttgcttctccagtcatttgcataatctttcatcataactacaggagctatttcttttaattggtcatatattttttcttgtctttgactcattattattaaatcaggatttacttctaatatagcttccatatccatagtatccatcattgagtgcccaactatctttacacctttaagctcttctcttatgtaacttggtaatttatcagtttcatatgagtctacatttgctgttgcaacaggcttataacctgctaataatagttcttcactacttcctgatatatcaactatttttttaggatttgatggtatcttaacctctcctttaacagattgtacaactcttgtctctgatttatctttatcctctgtattcttatctgaacatgctgtaacaagtactaacgtagttataatagatataaatattgcaagtgattttatttttttcatgattacttctcctacttgtttattatacttacatgatattgattatcataagcacatatttattatagcatttttctatttttagtcaatattattttgtaaaaggataaaaattcctaattaatcttaattatatatagcttagataaggttttcttatattaaacagtattttttttaagaattggacacaaacacaatgacttttaggttaaacaatgataaaatgcaatttatagataatgaatttagtaaggaggattcaaaacatggtacatttagtatattgtgataatgcaggaaaaaaaggagaaaaggtcttagataaaatcttggctggaacaaaaacaatggttattagaggtgctgctggtagaaaaataccacatagtagagtatttgaagatgagttactttattttatggaaaaaggaactggaaaaatatctgcaaaagccactgttaaaaaagtagaaaactatgttaaattaacagaagatgaaatttctaaaattttaaatgaaaatcaaccaaaattaaatttatctgaaaagcaaaaagttcgttggcataaaaaatgtttatgcttagttgaatttgaaaatgttgaagaaataacacctcttgattttgaccatcaaggaaatatggatgattggcttattgttgaaaaaattgaagatgtagttgttggtactagtataccttacaattatgagaagtctaaattttaaagtatcaataacataatactatattgctaaactctacttaaataaaaaaagagtgcatttaataattataaaaattatttttatacactcttttttaataataaatttaaattacttactttctaatctttcatatacatctataaattcttctgctaattgttgaaaattcatagctgtcattaaatggtcttgtgcatgaataagtataacacttatttcagttttattaccattagcttcattttgtatcaattctgtttggaatttatgagctttatgaattgattctttcgacttttcaatacattctctagctttatctatattcccgctctttgcttcttttattgcttcaaatgctagccctttcgcatcacctgcaaatccaattattccaaaagatatctctatcatcttctcatccatttattcgacctcctaaatatctctatagcttgatatgactaatccattcttttctaaaaattctttgacttttttagatgtaagtatcttgtgctctttcgttctatcaatagcataagatgtagaatttaaaatataatcatctaaaaaagctgggtgagacataatatccactacatcatacttcattatttcgtctatattttttataaaatattcttcacttacattttccttataaaaactatctattaaaggaactactttagaatactctaaattatattcaaatccacctcttattggaagattatacttggttacaatcttctctactactggctttaaacttactaaagtatggatatgatggtgactatctaaatgagatatatctattccaagcccttttaccctatctatttgagcacaaagttctctataaatctcatcacaatccattttttcaataatttcgtctgtaatcctcctaataaaaaaaccgtctttatcaacaatagtttttaagttagataataatggtctaccacaacttaaagtcatatgaactccacaatttaaagttttattttctttaagtaagcctactccatgttctaccccaggcatatttgccatcatagaagtagacctaactataccattattatgagctgaaattattccatagttcacagcttcacaatatccaaaatcatctgcatttattataattttagtcataccataacctactttctatagacaactatctattaaatctaggaagataatctttatgagcttccaacatttcgtctaatatagtttttgctaagtcatcagatggaatcaatgggtttatacaaagtgccaaaagagcagattcataatcgccatatacagctgctttagctaccaatacttcaaatgatttgatttggcttactaatccatgcacagaatctggtaaatatcctatacttattggttttggaccatttttggttattacactactcacttctaccgcttgttcatctttaaaatctcttatagaaccattgtttaatgtattaactacttggatatcttttttgtcattgtatatagaacttattaaattacaagcagcatcactatagtaagcccctcctcttttttcaagttgaggtggttttacatctaatttttcatccttatataattcaaataattgttcttccaattctttaactacttgacctctagcttttccctctttaaactctctcaactcatcctcaagcatttctttagttttatagtagtatctatgatatggacaaggtattgcacccaaagattttacaaattcagcattaaaatcaattgcctttatattttgcatacttatatctgctttgacaaacttatcaattgcttcttttgtaacatcttctccatctaaagatacatttagaccataaaccatatgattaagacctgcaaaatccatacttattctgtcactttctacattaaatagtttggcaacatcattttttaaatgaattggcacattgcatagacctatatatcttctaaaattagtatatttgaatacagcctctgttattattcctgttggatttgtaaaattcaccatccatgcatttggacataattcttccacatcttttattatatcaaatataactggtattgtgcgaagggctttaaataaacctccagcaccattagtttcctgccccataactccatgagataaaggaatagtttcatcttttattctcgcatctaaaagacctactctaagttgtgttgtcacaaagtctgcatctcttagagcttctcttctatctaaagtaagatttattttcatatctactccagctttttttaccatcctcttagctagatttccaactatctctaatttttcttttccagcttctatatctacaagccataattcctttacaggtaactcttcatatctatttataaaaccctctacaagctcaggagtataacttgaacctcctccaattgtaactatttttagtccctttttcatctcattataccatccttacctataatttaatatactctacaaaaccctatacatttatttaccgaaataaaactacctagttgttaattttcaatttattagcttccattttttcagacgctatgacaaatggaatatatattaatattgataatattaaattaaatagtgctaaagctccaccagtccagtcacctgtagccatcgctccacctaatataggaggtgttacccaaggtattttaggtaaaattactggtgctactaatccaaaatctattgctaagtatgatacagcactacatatcactggtgcaagtacaaatggaatcataaatataggatttaaaactattggaagtccgaatatcaatggttctcctatattaaatattgcaggtggcccacctaatactatcatttctttacgtcttctcccagctattaataaagctactattaatcccaataccattccagaaccacctaaatatacaaatgcatcaaagaatgcacctgcaagtacatggtatccttccgttgctcctgcttgagccaaggcagcattttctccacctaatttcataagtatagtttctgtaaaaggaagtgctatatttgcaccatgaagtccaacagtccaaagtatatgaattataaatgcaataagcattgtagaacctagactatcagctacatttgatagcggtgctcctaaataagtatttaaaatatctgttaagaaacttccattagaaagcatttttataaatattcctattacagtaaatatcattatagttaacattcctggtattaactttgcaaatgatcttgaaactgctggtggaactccatctggcatttttatagttaatttctttaccttagataatcttacaaatatctcagttgataataatcctattaatatagaagagaataaagctgctgtacctaagtaggtttgttgtatcattccccatccttcaactactgtagttcctccctcaggaactattttaccaatttgtggagccattataaaaaagatagataaagctataagcccagattgtaacccatcactctcataagattttgctagaaaataagcaacacctattactaagaatactgccattgtacctattgctccccaccaaaggtcgcctccaaatgtggtccaattttctccaaatatacttgccatcaaatttttgtatgcttccaatggtaagttatttatcaatgttcccaaggcacctaccatagttataggtatcattactataaatgcatctcttactgctactaagtgcctttgagctcctattttagcagctacaggcactatatatttatccataaatgacatgaatttttccattttacatcctccagtacaactttattttgaactatttaactctacagctctatctaacacagcttttccattacatcttccataatccatcatatttataacttctactggaatattatatggttttgccatttcagttgcttttcctaatacatatctaacttgaggccctaaaagtaagacatcacaattttctatttcattttttaagttcacttctgatatagcccatatttttgcttctataccgttttcctttgctgcatcctccatttttgtaactaataaactagttgacattcctgctgaacaagctaacattatttttatcattttttcccctccaaattagattcattaaatattttttaagtcataaattttttaaactatacatttaaaatatgcttttctattaattttttcttaatgtatatatcttatttttaaatgtatatacatttaattcttgatattattatataccaaatgtatatacatttcaagaaaactttttcattttatttaaattttattcgacaacagcattcaaagttaatgtatatccatagtgatatgtgtgtgagtactcaaaaatctcactattttgtaacttacaaatttggcttatatataaaagtggctctggttcttctaattttagattatccatacattcttcattcgatattacagcttgtacttctctctctgacatggctatcttgtatccacacacttcttcaacaaaattataaagagaattttcacaatgagtcttatttaaatttggaaataacttaactggcatataagtaatcatatatgaaactcttgcatcattggctaatcttactctttttatttcccaaacattttcttctaaacttatattcaacttacttgataaattttcatctgcctgaactatttcaagagataccaatatattagatactttatagcctttactttccatctctttagtaaatccacttacagacgatatattatcatatatattatttgcaataactatactacctacacctctttgtctagttatatagccttctttaactagattattaagtgcagaccttacagtcattctagttacattaaattcttcactcagctgtttttcagaagggattaaatccccttctttcaaactgtctgaatttattaactctctaacatgattttctataactttataaattggctctttcatttaattcactccttattaattaaatcttttatataataagataattttatatacaaataaagaaaatgtctatacatttaagataatttaaattttattcagacatcttgtacaactttccgagttttaataaagatataaatagacttatcattaatataccttttaatatacttgataaggttatactccaccatacaccatttagacccaacatttctggtctagatataaagtaagccaatggtactcttgcaccagtcagtatagtaattataatagaaggtatataggttctgcctaatcctttgaaagctcctgttgttattatttctaaacacataaaaaattgagaatagcctaatattttaagataaattgctcctttttctattgcctcactttcatctataaaaatagaaaatatactctctcctgcaaatactaataccaaagtagttattatcccaagtacagaagatacagttatagctattttgcaacctttatttattctagaatacttcttggcaccataattttgtccaacaaaactgcctaatgcaactgatagcccttcagccgtcatccaggaaattgcttctatttgtgagcctactttttgtactgcaacagccacaggcccccatgatgctactattactcctaatagcattgagaatactgtaaacataccactttgtattgctataggtaatcccaatttatacagaactttataatatttagtctctatttctttaaatagtcttaatttaaaatattcttctttacttttaactattatatatataaaacatgtagtaactactatctgagcaaatacagttgcaatagcagctcctgcaacaccaagttttggagcaaatccccatccaaaaattaatataggatcaagtataatattagttattaatcctactgtattaatacgaaaaggagttttactatttccaagaccgttgaaaattgcagtaaatactggattaataaaataaaataccatacctagagctactattatcaaatactgtctagacatggttataacttctaagtctcctaatctaaaaaaacctatcaattgtttattaagtactattaaagaaattgtatatattattgctagtataatatttatttctattgctgacttcatatatgatttagtagtgcttatattatttgcaccaatactttgtgctacttttatctctccacctacttttgaaatcataataaatgccattgcaagccatggaaaaaaaccagctgttccaactgcagctactgctttacttccggctttaccaacccatatcatatctatcatgttataccccatctgtataaatgaagtccccattattggaagtgatagcttaagtaatttttctgtaattcttccttctgttaaattaattctgtctttcattttccacctcttttatattaaatttatttgcttatatagctagattaatcattttatttgattgagttcactatccttcaatttatattatcatatctcaagattgcatctcaaccatacttatgtttaagataaagtattttacctatctctgataaaattaatacttatgaatataaatatagtcatttcatcaatacatattataacccttaacttaacttcaattaagtatacatactgtaatcaattagaatattttataatgtatcttccattaagaaataacaaatataagtgatttatctataattttatttatacataaaatagtatactgcaataataaaaaaactatatttgaatactttaagcatgtttactaattgtaatttccacacaaatttgataatatatgaatatattatggtgaaatttatagatatatattaattatggggagattgtgggaggttcttttcacaagacatttaagctatgaaaataaataaaaaatttaatagagttgatatgcaggtttcaatacttactgcaattattgtaataatatcttcctcatgtgtatatttttttaattatacattaacttataagagcatgatatactctttaagtgagaggtcaaaacatatctatgaatatgtagagagaaatattgataaaaatacctttactgaaattaattctaaagaagaccaatcaaaaaagtcttataaaagttctaaaatcctattagaatctgtaaaaaatactactggagtcatgtatctatatactgctaaaaaaacaaaagatggatcactagtatatgttgttgatggtttaaattcatctagaagtgattttagaaatgctggtgatttgatagaaaaagagatttggggagatcttaacaaagcattagataatcatatattgttacctaaaaagattaaatcaacatcttggggatacatatttatatcgtattttcctattcacaatgatgttggtaaggttgttggagtaataggaattgaatttgaagcaaaacatcaatacaatacatttaaatttataagtatagttacaccaataatagcattattaacttgtctaatatcagcattgattgcagtgattctatttaaaagaatatctaatcctacatatactgattttgctaatacagattatttaacaggcctaaaaaatagaaatgcttttgaaatagatatgaataacttaaacaattcaaatctaaagaatctaatatctatcatatcaatagatttagacggtttaaaaaagattaatgataaatttggccatcagacaggagacttatatattaagcaagcaagtaaaattatacaagatgtaataaataaaaaatatatagtttatcgtattggaggtgatgaatacataattattctaaaaaatttatctcacaaagaaataaatagtattataaataatattaatttaaaaatagttgaagaaaactcaactaatgaattaaaattatcaatgtctattggatatgctatttttgatgaaaaagtagatgtttctttatttgatacatatcgtcgtgcagattctcaaatgtatgataacaaaaagaaaattaataaataatatcaataataaatttaaaaagtctattctttaaataataaatcataagaatagactttttaaatttgtgtttttataagataaattatttaattaaagtttgttcttttttctaaacgattctttataaattcatatattactttcactaatatatttgtgactaatattaacacagctagtgctgctgcctgtgcagtactccccttatcatctagttgtacaattgatattgcagctacttttgaacttgcagtatatataaaaactagtgctgatattgtcaccatagagtttagaaaaaagtacataaagttctctaaaactgctggcaaacaaagtggtatagttacgttcttaagaattgatgcgctgtttattcccattgatttagctaccatgtccaattctttatctactttcttaatagcagtagtagctgttataaatgctactgaaaagaaatgaactatattacatataaccattataagtaatgttccatataatccattaaacaaatttttaatgtatattgtatccataaaattaaactctaatttattaaaaaataatacataagctatacctaaaactaatcctggcaatgccataggcaatgtacttaaaaaatacccaaatgattttaaatatggagctttttctgttttttcatttaaatatgcaaataagaaaacaaagctcgtccctagaatagctgtcaatagtgacatttttattgaatttataaatggtttaattccatcaatactgtttttcatagaaaagtgttccagtgtaagtcttaaatcatatggccaaactgatattaatgaggataagattacagttaacattacagctattataccaaatgcaataattcctacaacccctcctaaaatactatctcttaacttattagttttaaccttatatggaattgactttgaagttatatatgagttttgatttttttcaatttttttagttactataaacgatattattgcaggtattaaaagtaatattgatacagttgctcccattggcatattctgttgccctataatttgcttatatacatctattgataatacattaaactctcctcctatcacctttggagctccaaaatctgtaaaacataatgtaaatgatacgaatgcagaacttattaaagagtattttatacttgggattgttatgcttataaattctcttatcttgcttatccccatagtattactagcttcatatagtctataatcggttgaacttagagatatataaagtatttgaaaggattgaggaaatacatatataatttgtgccaatattattcccactgctccatatattggaacatgcactccaagtaaattagttaccaaaccttgatttccaaataaatatactagacctattgcatgcatcattgttggagcaaacataggaaacatagctaatgatttaaaaaaacctttaaatttaatctttgttctagttaatgcatatgcatatactaatgcaagtgttagtgatattacagttgatataactgatacaaatactgtattttttagagaatttaatagagattcagaagccaagtattcttgaaagttttgtaatcctacaaagactccatctttatctaaaaaagcctgtacaaatagatatattataggtgctaataaaaatattactaaagacataactaatactgtaagcatacatttttttatatctaaattcatttttgatttaagacttatacttttagaacttatagcattattattcatacacttatgctcctttaacttttggatactttaaatagtatttttcgtctatacttatttttacaaggtcaccttctactaaatttaaattaacccactcttttatagaaacatcacttattatgaaattttcatttaatttatcttttatttcaactctcaataaattccctctaaactctatatttgatattataccttggtagttttcttttgtcgatttctctatttgaacatattctggtcttacagttaatatagaatctccattatcaaaacagtttgtatctcctataaattgagctgtaaataggttttgaggattttggtatatttcttctggagtccctatttgcattatatctcctccatttagaatagctattttatctgccatagttatagcttcttcttggtcatgtgttaccattattgtcgttatattaagttctttttgtaatcttttaatgtccattctaagcttgtgtctaacctttgcatctaatgcggacattggttcatctaaaagtaaaaactttggttcaagagctaatgctcttgctattgcaatcctctgttgttgcccacctgataatgctttaggatatttatgagcttcattagtcaatccaactgtttcaagtacttccttaactttattatctattttttcttttgaaacttttctctcttttagtggaaaagctatattgttataagcagtcatattcggaaataatgcatatgattgaaatactataccaaaacctctctttgatggctctaaatttgtaatatctttatcctggagaattatagttccactatttacatcttcaagacctgctattattctaagtaatgtagttttaccacatccactaggtccgagtaaacatagaaattccccttcttcaatatccaaactaatattatttaaaacccttttttggtcataacttttaaacacattatttatttttaagtaactcatatcttatctctccttatatagttatttttttattttaaattttatatcctactttttcttctaaaattctttcatctaaattattaatttaaaccttacttactttcagattttgaaccgtattttgattcccaagttttaagtactgtacttctgtttttggcagcagagtttaaatcaacttcttttataagctgttcaaatggttgtttagaataaccttttggaactggattatatgtctttatggaagtaactgctacttcatgtgcatatctatccatagctgaatcacttattgcccaatctaaaaatagctttgcttctttttttatattatcttttttaactaaggcatttgcttctaagtcccaacctgaaccttcctttggaaatacaacctctataggttctccactagataattgttgtgtagctctatatccaagtgtaatacctattggatactctccagagccagctaacttcgcaggttttgaacctgagtgtgtatatgtagctatatttttatgtaatttatccatgtaattgtaagcatctttttcacccatcatttgaataagccctgatactgtaagataccccgttccagatgatgctggatttggcattgttataagtcctttatattctggttttattaaatcttcataactttttggaatatctatacctagtttcttaagttccttataattaactactattgctgtctctgggacactcattcctacccaagatacatcatcttcagtatctttaaattttttatcaactttatcataatttttaggcttatatgcttcaagtgcaccatctttttttagctctatcatgttcattgctgataatccccatataatatctgcttgtggattatctttttctgctaatagttttgaagctattacaccatgagaatccataactatctctacatctatattgggatactcttctctaaaaccttccatataataagctatctgctcttcctctagtgctgcatatattgtaagtttattatttccttttccttgagtagtttgtggtgttgttgatatgcaacttgtcataaatgtaatcactacaatgcacagacaagtaaatataaattctttcatatcttccccctttgtgttttttcctttttttatttgttttttattgtttttgcttatgtttatataatacacctaatttgttaatataaagttaagtgtaaattaacagttcgttaatttttagaaatttttgttaaatatattatttttagttaaatacagtctgtttttaaacaatatattaatttttatagtatctacattttaatttaaacataaaaaataagtctaacctctataaagtagaatgttagacttatttttataagtatttaattatacaaccaaatcattttttttcttttcttcaagtgcttttttaagcaccatatccttaaccttcataagtctagtagtacttgctctctcattttcttcaagcttcatagctatatacttaatagtctcaatgtaatttggtatcattacattttcaagagcattaacacgtctacgtgtcttttctatctcttgtgcaagaagctgtgcacttttttcactttctgcaagtcttaaaagtggttgcatagcatctgagaaagcttccatagcagaatctaattcacctgatgtaaaagcaagaccataaggataaatatcactttgattgttttcagttttaaagtcaaacacaggaacatcaacactcattatatttctcgtagaaacatctactgaaactgattgctttggcatcataagtgctgaacccagatactcctgactcataactgctcttgcgattataaagtttttataagcagtatcaagagcattttctgcttcttcacgcaatcgcttattttctcttacaatctcaagaaattgtttcataagttcatcaagtttatctttaagaagcttatgacctcttgtagcagttttaaggagtttcttaagtctagtcatttccatacgtgttggatttatatttaatctagccacagatatcactccttaggcatatatttttcaaaatattcatcacggatacgtttaagttcactttttggtaacatactaagaagcttccatccgatttctaatgtctgctcaatagttctatcagttctaaatccttgtgaaacatattctttctcaaattcatctgcaaacttagcatacattaaatcaatctcagaaagtgcagattcaccaagtatagccataagttcttttgcatccttacctcttgaataagctgcaaaaagctggttcattgtatctgcatggtcttcacgagtcttacctttaccaatacctttatcttttagacgagaaagtgatggtaaaacatctataggaggctgtatatcttttttataaagttcacggctaagtataatttgcccttctgtaatgtatcctgtaaggtcaggaattggatgtgtcttatcatcctcaggcattgtaagtattggaatcatagttatagacccttcatgccctttcatttttcctgctctttcatacatagtagcaaggtcagtataaagatatcctggatatccacgacgtcctggaacttcttttttagctgctgaaacttcacgcaatgcctctgcatagtttgtaatatccgttattataacaagtacatgcatatcttgctcaaaagcaaggtattctgctgctgtaagtgccattctaggtgtagatacacgctctacagctgggtcatttgcaaggtttacaaacactacagaacggtcgattgcaccagttgctttaaaatcgcttataaaaaattcagcatcttcaaaagttataccaactgcagcaaatacaacggcgaacttagaatcagttccacgtacttttgcctgtcttgcaatctgaactgcaagattggcatgtggcaaaccagaccctgagaatataggaagtttttgccctctaaccaatgtattaagtccatctatagcagagactccagtttgtataaattcggccggataatcacgtgctgctggatttattggagctccatttatatcaagtcttttatctggtataatttctggacctccatcaataggtctacccattccactaaaaacacggcctaatatatctggtgaaactccaaagtcaagactctttcctaaaaaacgaactttactttcagcaaggtttatacctgttgagctttcgaaaagctgaacaagtgcagtatctccatttacctctagaactttgcaacggcgaatttctccatttgaaagttcaatttctccaagttcatcaaattttacaccttctacgccgtttattaacataagaggaccggctacctcttgtattgacttatattcctttatcatagttcttcagcccccctctttttaataaggtctgcaagctcgttgtctatttcatcttcaattgaatcataagctgcatctatatcgccttcttctacatacttagcacgaccaatcttttcaagaactgaaagcttgataatatcgtttatagtaacattttgcttgatagcatcttgtgctgacttatagaattttaatataagtcccatcattctatattgtttatgaagtgatgtataagtatcaacttcatggaaagagttttgatgaaggaagtcttctcttatagaacgagtaacctctagtatcaatctatctccatctgaaagtgaatcaaccccaaccaattgaactatttcttgaagttcagattcaacttgtaaaagtttcatagcttgagctctttgagctgagaaattatcatttacatttttatctgcccatacatcaactttttcctgatagagtgaataactagtcaaccagttaattgctgggaaatgacgtttatatgctaaagatgcatcaagaccccagaatacttttactatacgaagcgttgcttggctgacaggttctgatgtatcaccaccaggaggagaaactgcaccaattgctgtaagtgttccttctctttcatccatacctagacaatttacctttcctgctctctcatagaattgagcaagacgtgaacctaagtatgcaggataaccttcttcaccaggcatctcctctaaacgaccactcatctctctaagagcctcagcccatcttgatgtagagtctgccataagtgcaacactatatcccatatctctaaaatattcagctattgtaataccagtgtatatagaagcttcacgtgcagcaactggcatatctgatgtatttgctataagcacagttctttgcataagtgactcgcctgttcttgggtcttttaattcaggaaattcaagaagaacatctgtcatttcatttccacgctcgccacagcctatatatacaactatatctgcatctgcccatttagcaagctgatgctgtgtaacagtttttccacttccaaaaggtcccggtatagctgctaccccaccttttgtgattgggaaaaatgtatctataactctttgacctgtaacaagaagtgaatctggtgttttcttttctctatatggtctttcttttctaactggccatttttgcatcatagttacaggtatatcattacctttttcatctgtaataacacaaactgtatcttcaacagtaaattcaccagaatatatttcttttatagtacccttaactccataaggaaccataattttacattctactactgctgtttcttgaacgccaccaattatatctcctgctacaaccttatcaccaacagattttttaggtttaaattcccacttagttgttctatcaagtgaagatacttcaacacctttagttatattagtacctgaaatatcatacattttttcaagtggacgttgaataccatcataaatagttgaaataagacctggtccaagttcaacactcataggcattccaagagaaactacttcttcccctggtcctagaccggaagtttcctcataaacctgtatagaagctttatctccatgcatttctataatctcgcctataagatgtttatctgaaactcttacgacgtcaaacatattcgcatctctcatgccctccgctacaacaagcggtcctgacacctttacaattgtgcctgttttcatattctctcacctgcaatcatatactttatcaaaatttaaatattccctcctatattttattagcacatatctttagcaccaataaaatttgagattgtcttttattcaactttcatctattctttaaataatatatctgcacctatagcacgtttactagattctcttacttcattcatacctaatcccatacttcctccaatacctggaataactataatggcaggaagttggtaatctttgtattttgctattgattcttttgcaagcaatgatgcctgttctgtaatataaattatcgcatattcatcttcaaccaacttatgtatactttttttaatttcgtcactatcataggctgggaagatatctattccaagagctaaaaatcccatgatgctatctttatctccaactactcctaccttatacataagcatcccttagcctttcttttatagtatctgcgtctatattattaagcttactagtcaaaataattctaattgtttttatctctgattctttagcatataaatatgcaattagtggttctaatgtaagaggcttaaattttgctcctctaacatattccataagatagtcatcacaaagtttttcaaagacagtaaaaccactatccatgccatttttacagacatcagagtaagaagtagatttaaaacatgatgctggagtatctgaggaaaaagcttctaagaatttttccttatcaagtgagccacctgaaacaaacacattcataaacatatcaaaatctttcttcatatttttgactcttataaaactctttagatttgttaaatcgcaaactttcataacataatctattacaaatttgttttggctttctttagcagtttctttcatactggtaaaggttgctttatctagaacaatatcaaccatctggccattttgtgtcttattataaacatcaaatgcctctaatatagctgatgacattatcttaggtaaatcactaaaactacgatttgctaaagattctctaagcttaataagaggaattgtacctccatcaattaaatatttctcaccatctacaccagaaatttcttctttaatcagcacttttaaattgtgatagtcatttttataaagaaatacatcaacaaatttttcttcaggagctagacttttaagaatttcatatgtctttgataattcttgagtcaaaatattctcaaaattatgtatattattatttgatgtatcagcataacctgcctcagctataattcttaaagagtcttcagggcttttggcttctgccatttgaataaacatttgtctgttaagaagctgtttttcaagcactcttattcgtgcaacggcatagggataagttttttcttctgccattttttaacccctccttaattaaacaaaatttctgctgcaatttgttcaatatattcatgctctactgcaattatggcttcaaatgaataattgtactcaatgtcaccttttttaactatgaaacctccagtaatatctctagtttcatcagacactttaatgcctttttttgatagcacatcttttaatgtttttttatcttttttagataatactatctctgaatcatctgtacaatttgatttttcaatcatgtttagtataatctcttcatattcattatctttaagatttaaaagtttgtttttagcttctaaaattacctcttctaaaatctcttgtttttttgataatatttgctttttagcctccatataagctcctgatatttccttagaagccgctttttctgcttctgcctctgcaagctttgtataggaagccatttccttttcagctttttcattagctgaatttacttttaaatctgcttcacttttagctttatccaatatttcttgtgcttcttgtttggcatcagctataattctgtcaatcattttttgttcattacccataggagtgcttcctccttttcattttttttacttatgaattataatttataattaaccaattgcaattccattgtaagctaagaaagaaacaagtagtcctaaaagagcatatgtttcaactattgctgcaaatgttatagctttaccaagttcttcaggtctttttgcaactattccaactcctgctgctgctgctttaccttgtgctatacctgatactaaaccaactaaaccaattggaagtcctgccataagaagttgtaaaccttgagctgatgttggtattgcatctccaccaataatccctgcttttgataaaataaggaaagctatgataaatccatacagaccttgtgtaccaggaagaagttgtaaaactagaagttgaccgaatttactagggtcttctgttacaacacctgctgcggcttgacctgctattgaagtacctttagcagaacccatacctgcaaataatgctgctatagcagctcctgatattgccaaaaattgaccatttcctaacgcgtttaaaaattccatatttacatctcctttttattaatgcttgtatattttgttttatacttaaacggaacaaaaggaactcctccgccttcataaaacttattgaaaaattctacatactgtaacctacttgtatgaacatatgcacctagtgcatttataagaaggtttattgtgtgtcctacaacaccgattacaactgcaagtatcggaccagctatagcccctaaaaggttgataacttgtgctataactcctgttgttaaacaaagcgccataattcttgtataagataatatatcagcaaaataacttgttatgccatagagacttgaaaatcctttaaaaagcttaacaggaatacctttaaagcttcttccttgagtaagtacaagacctatagcacctataattgctaaatattttcctacttctgaaaatacacctatgtcccctgcaacaaaaggtattataagtagacatacacctgttatacacaaataccaaaaacctatgtcaaagattgcatctattacctttccacttcttattaatgtatatgcttttattcccaaacctacatatatatggataataccgaacagtaacgacattcccataagtgtcataacatcctctaaaggattaattaatgcttttataggaattaaatcccccaaaatacccccgaatataagaccccatacagtagttgaaactccacagataccaataagtttaattaaatttccttcacctttttgtatctttaatttatatacaacaaatccacagactactgcaattattaacccatatgcggcgtcacttagcatcattccaaagaatacaacaaagaagaaagttaaaattgtatttgggtcaatatcttttgtacttggatagctgtacatgttagttacactttcaaaaggtgttactaatttattgttttcaagcagaattgggaagccttcttctttacttccttcttcagtctgaacacaacaatcaaacttttctgtaatttctttaattaattcatctgcccttttgcttggtaaccaaccattaagacagaatgttgtttttgttttgacaagtctctctataatctttttttggtctctttctatagtgtaaaaatcatataggttttcaagcatgtgtatactatctgcatgtcttttaatttcctctgttttgtccttagaaacgttttcctgcctaattatcatttcattgtatttcttgatagcttgtaacggtgtaccttcttcatttggtaatgaaaccactgaaaaattaaattcttttaaaacttctaaaacatcatcaaaagtttcttttaaagtaattaaataaacatagttcattaacttgtcagaattgacaatcccaataacactttctggtatttcatcttctaattttactcttaaagcatcaatatttgcgcttatgggcacagttccaagtatagtttttgtatacttagtttccatattttcaagaggaatatcaaagttcacccatggttctaacatacttttattgttgttaagtaagtttatgttagaccttattgtacctatctccttgtgcaaattgtttaactccagagcttcagcataaacttgcccttctttttcactatcaattttgttaaactctctttttggtgcaagtagggattttttttgtttcactagtgaagaaacaatattaattgcttggtttacatgagacattttctgctctagcattataacttcagattcttcactatcttttacaagataattttttaattcctcctcctcagtaagaaaggcactatcatcaatctgaacaaacccacggttcataagtagctttaaaatctggcttttttgagcttctaagccaacaatagatattttgttcatattaactattgccatattatctcactacctttccaataaccgcttcaatagccttactttttctttcttcagcagttttttcaattttcagacattcacttttagcattagctaagattttatcaacctctgctctactgtcggtgactgccttctcaataagagtttcttccataagctttgcttgttttcttacatcagcaaatatgctttcacatttgtttacagcatcagctctgatagactctgcatcagtaacagcttttactttgatactgtctgctgtctgctctgcctcaacaatgctttttattatttcaaaagccatccaaatcacctctcttacctttttactatgtatataaccaattagatttttttattctaattagattactacctcattgttaaagtataaacagcatttttatataataattaatatttttcaacgtttatttcttaataaaacatattttagaatagtacttgcctagatttacatccttttttgacttacttttagactatgacatgagtatggtttttaaataccattattttcaataattataatttaaagcgatatagtttgtcaatagcgttattttgttttaaaattaacgctatgtcgacattttaaatttttattttattttttttataattttaatttaatttattacatataaaagttttttatattctttttcaacctctaacccttgaagtttattgttttttttgaatttttagaaatatctcgcactattttatctaacttttataaatcatcaagctatatcgatttttgtcaccttattttcaatctaaattttttatatatagttagaaataaatcaatatttttaaagattgataaaacttacacttagttctaatagttttattttaaggcaatgtattaatcttaagtagataatatcattagttactctatatattcgacaacattataaaaaaatcctcgtaccaatcactccaatcttcaataggatatgctgctcctccatttacacttttcagtaggtttgatgtatattcttctcccatggaaaaaagttcccctactgttatatcataacctctagatgtaacaaccttacaaaatgaatccataacatcacgttgttctcttgtttttataagttcctttctaaattcatcatcattcttagcttcttctaaaattttagttaatttttcattcattatgtatttctccttttaagtagtctttctgtaaacttcaataagctttatataaaaaggaagccatcctaaataaactaagatgacttcgcttaactgttagcaacacatttactagtataaaataattggtgtacctggttctatattttcatatattttctttgccttagaaaaaggtgtatttacacatccatgtgaacctgaagacttatatatacctccaccaaaagaatttctccaagtagcatcatgaatgcctatgttcccattaaatggaagccaataacttacaggtgaactgtaaccttgaccagttaatgaaacatttctagccttataattaagaggatatatacctgatggtgtagcaaatcctctagctaaatcgcctgttacaacatctgttgatacaagcatttctccatttttaaagaaccacatatgttggccagaaagactaatctctacatatgtatttccaatatcatctttattacgagatacagctttttgtatgtaaataggttctcttgtaacatttttaccagcttttacaacatcaactaatgcttcagcttctttctttttatctatcaaccaaccataaattccacctgaaattgtaatatctttacctgtggcagttttaaatggtcttgagtcaccaaaagtactgtattttttacttaaacttcttgtatattctaccatagcatcattatcaaaagttatgtcataattcttttctgagtctacttttaaccatttattaatttcagaaccatctaaagtttccttacggtcactaaaatcatatgtaacgactacaccaacatacttatctaatgtcttaatagcttgtttcaacttttctgaatcctttgtgttgtttggtgcttcataaactttactttcatccagagaaatagaagtattcccagaattaattgagttttgtactaacttataaaaatcatcttttttcactttgtttccaagtacctctggtactataacataagcgtttttagtgctatcatacttaggataagcactcttaggttctacaacatttttactatcaaaacaagataaagcattaaaccttttttctagtaaatctttattatatgaaagagttatcatattattatactctttagatttaaatattccaccaatccatccaatagcgctttgactatcttttatcttttgaactttatcatctggtgtaaattttaaatcaatatcttttgcttttatttgttctttcttattgtttctttcctctaagtttaaagtataggaattagtactagatgttaacaaatcatttacttgctcaactgtttttcctgaagcctttacgccattaatagtcgttccaaagtaaaaatgatttctaaaaaagattgccattcctatataagctacaaacaaaacacctacaactatagctatcttaaattttagatttttttgtccactttcttgttttacctcttttccatcaatcataattaaatccttccttacattgtaattacctatgtactttattggtttttaaacaaaaccatgtatgccttattttatatacccaaattactgtatcattgtttatatttttaaatatatagttatttccataaaaccattttatcttttagacaaaatgactattataaatcacccctttcaaaatcccttaaatacaatctctgctatattaatatattaccatacttttaataatcgtgggttatctatctgtttttgtaacactaaactactcttttaaaaaagaaactaattttatgttagtttctttatcttaacttatttttatattgaattttagcttaacataacgttgttatatagattctatttaattattttagtttctatatcttttccatcagcatattctttaagtaactccttagcatatccaaaatattcttcaatatcagattcttgactaaaagaaaatatacaaattaatatttcatttgcatcttctgttatcattgctctttcagaatcactagttggactcccaaatttacccactgaatcagacaatataggaagattttctatatttattaattctttcccaatacccttatactgttctccttcatctcctacagtaaaacatactggtgaatgtaatttgcttacattatatgtacctactggatataatgattttattgatattaaattgtttatttctactatattatttattgtataaagacccttcccttgaataattcttctaaccaatgcttctgaagatgttctatatctacttggattttttccaagctctttataagcatttcttgcatctttaattttatctagtttcgtaatgtcttcaacttttagactttgatttatagtatcacaaaactcatttatttcattaattaatttttctgagcttttatttactgctacttttgcttgaatgcaacccaacttagcattaggccatctttccttaagtttgtcatcaatactcacatctatcatacttaaacaactcctatacactaaatttttattaaagtttttatcatctatacattatagtactattcttttgttaataacatgtttattagcaaaataaatttatttttaatataatttttataaaatacaattattttttgctttatattaaacaatacattgataaaataaaaaaacactaattatttagcagtgatttattaaaatcaaacattcataatagtgctttatataaaaattaaattttgttttaaagtaaatctaaaaaattcttagctggcattggtcgtgcaaaataaaatccttgaactaaatcacatccaaattgtttcattaactcagcttgttctttactctcaacaccttctataattacaactaaatctagtgattttgctagagacactattgattttgctatattgcgacttctctcatcatgttcaataccattaagaaaagacttatctagtttcaatatatcaattggcatatctcttaaacaactaatagaagaatatcctgtaccaaagtcatccatagaaatagaaaatccatacttcctcaactcatttaaaacattctttaaaatatttaactcattaatagccacagtttctgttatctctatttcaattaaatctgaacttagattatacatttgtattgttttattgataaattttacaatatctggttgatacaactcaactctagataaatttattgaaactggaactatctttttaccttgctttttccattcagataaatcattgcaaaccctttcaaatacaaatctcccaatttttaaaatcaacttacttttctctgctattggaataaatactgcgggacttataaaaccatgttctggatgattccatcttattagtgcttcactccctatcatttctccagttacaagtgaaaacttaggttgataatacacttcaaattgattttttaccaatgctatttttatatcatctaaaatcattgattcttcactaagcttattcctaacatcttcattataaatagcataatttatatttttacctttagcaacagacctagccatatttgctttatttacagccttttggatatctacttcaccttcttcaacaaaataaatacccacacacagagaaatttcaaatactatactcaaattactttcaatattatttcgtatactatcaatttttcttatacgtttattttttccatttttataatcacagaaaattgcaaaataatcacttgaaagtcgtgcatatacttcaccttctgttaattcttcttttaaagcttttgctatcgtaattaataaattgtcaccaaattcatatccaaaagtatcattaatcatcttaaagttattaatatcaaaatatactataatataatttaaagatggtttatctaaaagatacttactacactctctataaaatttattttgatttcctatatgggtaactttatcttcataagccaaacttaatatttctttttcattggatttttttatataaattatataaaaaataattgcaataaatattaatataataaataacactgcatatatagctctgttgattatttgttctgaattactaaatacaacagtttctggaattgaaaaaatcaaattccaatcttttatataattattttcactattcccattatccatagtagcatatcctaaatatcttctttcttccaacatatttaatacagttgcacctgttttattttcttgcaattctttttttaatctatttatttctcgaatatcattatcctgttttaacaatttataaatattttttgataggctatcctcttgcggatgaaggataattgtaccatcatttcttacaacataagatatactattattttcataaaaagatacattaataagtttcatcagagtattgatattgtaagtacaatataaaactccaactactttatcattatttaataatggtactgaaatagtaatcttctttatagacttatttacttcatcaacatatggacttgaaacatacttcttacctttaattgagtttttgaaaaattctctatctttcactgaaaacttatcacctttggtattttcagcattaccatttatatcaactattgccatagtgtaaaatttttgattttccatttcatctaaaagatttttcattttttcctcattaggtatatcttgatttaaagcataatagttagaaaaaatatttaaaacatctaaatctttttcaatttgtctttgtgctagttgagagccttgtactgcaacttcttttatatgtatttttgcctctgacataagaagatgttttgtatcttctatatagatataccccattgtcaaaaataatgatgttaaaaaaagaattgtaattaatgtaaaacttttatttctccctgtcattcgactcctcccctaattagtcaatacttcatatagataatatatcctttttataccgattcatcatttatattgtatataactattcttaaatgttacacataaaatcaacctaataaccataaaaacattcttttattatcataataacactatttagttgaattttaaattaaagaataaaaactatcaatttttctaaacaaaaaaactcttatacaataaaactttgttttatgtataagagtttttattttatctattttatagtaaatttatcttccataatatgaatttaaatacatatcttttatttcattcataagtggatatcttggatttgctcctgtacattggtcatcaaatgcttgaatcaccatttcatctattgaatccataaacttaggttcttcaactccaaactcttttatagatttaggaataccaactttaagttttaaatcttcaatagctaccaataaactttggaatttctcttcatcagaatttccctttaatcctaaaaatgaagctatttcagcatatctttttaatgcttctggatatttatattgagagaatgctcccattttctttggtgcatctgaagaattaaatttcataacttctgttatcaaaagagcatttgcaacaccatgtggtacatggtggaaagcacctaatttatgagccatagagtgacaaacacccaaaaatgcatttgcaaaagccatacctgccattgtagaagcatttgccattttttctctagcttctgggtcttttgcaccattatcatatgcacgtggaagatattcaaatatactcttaatggcttgtaaagctaatccatttgtataatcagttgcaagcatagatacatatgcttctaatgcatgagttaatgcatctataccagaagcagatgttaagctttttggcatattcatcatcatatcagaatcaactatagccatatttggcatcagttcataatctgctaatggatattttacccctgtatcttggtcagttataacagcaaatggtgttacttctgaaccagtacctgctgatgttggtatagctacaaaattagctttttcacccattttagggaatgtatataccctttttcttatatccataaatctcatagctaggtcttggaaatctacatctggatgctcatacaatgtccacattatctttcctgcatccattgcacttcctccacctatagatattattacatctggattaaattctctcatagctttagcgcctatcttagcacattccaaagttgggtctggttctacttcaaagaatgtagtgtgcttaatattcatttcatctaataaatcagtaactgctttagtatatccattattgtaaaggaatgtatctgttacaataaaagctctcttcttattcattacatctttaagttcttttaatgctacccctaaacaaccttttttgaaataaacttttcctggtgatctaaaccaaagcatattttctctcctctcagctactgttttaatattaagtaaatgcttaactcctacattttcagatactgaatttccaccccaagacccacatcctaaagtaagagaaggagctagtttaaaattatataagtcccctataccaccttgagaagaaggagtattaattaaaattctacaagttttcatggctgaagtaaacttatcaagtttttctctttgatttacatcatcaatatataatgaagatgtatgcccaaatccaccatcttctactaatttttctgcttttctaactgcattatcaaaatcactggccttgtacattgcaagtactggtgaaagtttctcatgagcaaaagcttcttctatttcaactgattctacttcacctattaaaaccttagtatctactgggacttcaaagcctgcaagttttgctatagtacaagctgtttgcccaactattttagaatttaatcctccatttactaaaattatatttcttattttttctgtttcatctttatctaataaataagcaccacgctctttaaattcttttttgacttcattgtatatattttctaatactataaccgattgttcagaagcacatatcataccattgtcaaaagtcttagatacaagaattgagtttacagcagtttttatatctgcactctcatcaattattgctggagtattacctgcaccaactccaatagctggttttccagatgaatatgctgatttaaccattccaggacctcctgtagcaagggtcaaatccacttctttcataacagttgtagttaattctaaagatggctcatctatccatcctattatgccttcaggagctccagctaaaacagcagcctcaagaacaacttttgcagcctctatagtagaattttttgctcttggatgcggagagaaaattattccatttctagtttttaaagctaaaagtgctttaaagatagcagtagaagttggattagttgtaggtacaactgctgcaataacacctattggctcagcaattttagtcataccaaatgcttcgtctttctctataacaccacaagttttagtttctttatatgcattatatatatactctgaggcataatgattctttataaccttatcttcagcaattcccataccagtttccttttgtgccattatagctagaggaactctttgcttattagctgccaaagatgctgctaaaaaaattttatctacctgctcttgagtatatgtagcaaatattttttgagcttctctgatttttgctagttttttaactaagctttcaacgttatttacagtatctaaaccaactgacataacttcattttcttttttattttctattattacttgttctttatgagccattttaacaacctcctgagatagttttttatttattatgttaatttattaacattatagcatttactttttctattttcaagttatttttttaacattttattttttatctaatataacatcatttctactaataatatctagctttacaaatacttaatttaactagatatcactttattttttacgcaaatcactaataaaatcatctaaaaacttaaggataacgttatttttttaacgtttatatttttgtattttttgcaaataaaactttataaaaagaatttttaatatgatattctatcaagtttaaaaataaaaatacttgaaaatgaaaataataacttgattaacaagttaaagtaaatatagttaaatgtacaaacatttacaacatatagtataattaaaaaaatatatattcatgatttttatatactatgaaataaaatatatttaatattatatagataaatttgaagtttataagaaggaggataagcatgaaaaaattaaaaacaattagcattttttctttgattataagtgtaattttaacgattggaggtattggaatagtaacttattatgtagataatttgtttattagaggactatcagtatttgttttaattatgtcctcttcttttgtatcaacaacagttagattgatatttgaagagtcaaaacgatataaattctaatttaaaaattggattaagtaaataattttaatataccaaaaattacggagattagctcaaaatagactttttagttcatgatgcatttttttgtatgaaattaaatatattttcatcatttcaacaatgaaaaagaggcttctctctattttgagacagcctctttgctagtattgtatctaatacataatattataagaaccaattctattgatgtggactttttataacaggctgtagctgtttgttctctagagcaagttctatagttggaattattagctcagtatgtgcaatcatagaattaggctttgctttgcaattatcttgaccaaaaggtacaaaatatatatttttagaattaaggagaataccaatatttttgaaattaaagcttagagcatcattcgttgatattgatattactagtggtttatcattacgaagatgaccttttgctgccattaatactggtgaatctgtaataccatttgctaattttgcagcagtatttccagtacaaggagctattattataatatcagcaatccctttaggtccaaatggttctgcctcttcaatcgtaactataggtttatttcctgtaagttcatatgcttttttcataaactcttcagaatttccaaatctacaatcgatattttgtgatacatctgaaaatatagtgtgtacattagctccttctttaaccaaattctctaactctataaatattttatcataagtacaaaacgaaccagtaaatcctactccaattgtaagtccttcaagtctcatttctaatcccttctttcatttataatattttctatagcgttaacaagaatctcaccagatgtctttggtgaatatttaccaggaagcccaaggcaaagagtcgcattaatccctacttctttaacaacagaataatctactcctccaggagaagaagctatatctataatagttacttcttgtgatactttttctaatctttctttcgttaaaatacactctggtatggtgttaaaaatataatcaaattgtaaaagtttttcatcaagttgacttaaagaaatactggaatatccaaatgcattagccgtacttcttgcatcattatttcttgcaccaacgcatacatttgcatccaaagcgtataatttttttgcaagtatttgtgcacatcttccataacctaatactaaacagttactttgatgtatattgattatacttcttttaatagcttctgctatagccccttcagctgtagcaactgcatttaaaatagcaacatcattcattttcataaaatcataaatctgaatagagtgttgctcgcaaaatttacaaactttagttggtatgttacctccaaataatatttgattaggagataaattaattagcaagttatcaatagtagcatcaagacaatcatccgtattttcaatattaacttgattctttgtaaatggaattggacataaaataatggaacttttggatagtgcttcagctagtgaagttgattttccaacgattccatttataatttcatttgatatcccataagtgactacagaataccctttattaattagtttttttaccatgtacacttgtcgcaggtctcccccaataacagttatatcgtattgatttgacatattgtaagcctcctttactatatacaatatgtttttatcaatacattggttcactaaaattactaaatattatacttataacatttttaataatgctaatctatctatcttttcagaagaggtatatggaaatgaatttaaaaagataattttctttgggatttcatttttcattagattatctttcattttaatcaacaaatctttcttcgtaattttgtctatagttattacaaataatacaatttgatttcctcttatagtgtctgagtacggcaatacaattgcatcttcaatttgaggaatttttttaacttcattttcaatcttagcagaactaactttaaatcctccaatatttacaatgtcatcacttcttccttcaaatattaagtatccatcattatcataatatccaatatcattgacagaataaggtttggttgcattatatactgcatattctgtattcacaaaaatttttcctcctctaatatatatatctattcctggaaatggtctgcctacacttagaggtttttcaattagttcatcatagcataaatatgtaatataatttaattcacttgccccatagtataaaataatttcagactttggcatatatttttttagatttcttgcagtatattcaaataataattgagaccctgtaaaaatacttactactttgagtactggttcttttaagtgtttaaccaaaagttgaagttttgtaggtataaggtatatgttagttacattatattgttttattgtccttatccatgatttacaattaagacctgaacttattacaatactacctccttcatataatactgacattatagaatttagattccctgtaaaactaagtgttccattaacaaacaagattgattccccagagatattaaaaataccattttgtataggaaaaaatccagcccaactctcatatgttctatataatacctttggaacacttgtagaacctgaagataaagctcccatacaaatacttttatctaaataatttataaggttcttatattgatacatatatagattaaatttaggattaaaaatagaaaaattaactttttttgctacttcattattgttatcatcatataaatcaataacgtccatagattcatcagatataatgattgaaatattattttttaataaaatatcatctaatacttttttagaaagattataatgacaaataataggaatattttttgaataattaatagcaaaaaaactaatcaactgaaacattatatttttagaatatattaaaattgagatattttcacctaaagaaatttgttttcctagttgctcactataacttaatatattttcataagtatatttttctccatctataattaaaaaatttttatttttatgcctctctttttttattcttaaaagttcataatagttcataatctacaccctttcaagcagtaaagctgaacctagaccaccagctgcagctatagagcaaattccatatctacccttagttttttctaatgcttttaaaagatgtaatgtaataattgcacctgaagcaccatatggatgtccatacgctaaagctccaccaaatatattatatctctctattaactctggatactttctttgaaacaacacatctataactgcaaatgcttcattaaattcaacagcagatacatctaaataattaaggctttctatctctaaaagtttatccattgcttgtatcgctgatgttggacttaaggttgcatctgttcctattgtgcatgtattaataatttttgttttaggcttcttttttacatgttctaaatacttcttagaacatattataataaatgaagctccatcattaataagacatgaatttgctgcatttgtaatagtttcttttcctaaaattggtggcatcctatctaataacctttgactcatcttatcacgtataccttcatcataggtactattatttataggagatataatatcctcaagtattttttcttctcttgcttcttttgctcttttatgactttcctttacccaaaaatccaagtctgctctctcaatttgatataactctgctactctttccgccccttcgagcatactattttgactattatcatcaggagaaaattgagcaactgtataatttggattatttgtattatatcgcttatcattcttatgatatgtgcgcattggttgtagagaactactttcaaaaccacctgcaataattaaattacactgaccagatttaacctttgaaaaagctatgtctatactcatcatagcagaagcacactgcatatccacagtaaaagcaggtacttcatttgacactcctgctgttaaagtcattaatctggctatattccctcctgtcccaactgcatttccacatataatctcatcaattttgtcaatttcatactttttaattaaatcttttaaaacacttgctcctagtaattcaggttgaacaaattgaaaaattccattttttagacctatatgacttctcaatcctcctaatataaaaacttccttcatacattacacccttccttatattatagatttatcatagatttcttctgagtacattgttcagtttagtgcctaaaaaagatgcaataaccgactttattgtatctccaattaaaaatggtactactgctgcaaaaagtgctgcttctactgtcatttgattaaaatagcacataaatactgttcccataaaatatataataggcattccaacaaaaattgttattagtatatatctcttaatatcattatttcgtccttttaataaactaataattagtgctgcaaacaaaaacccaaaataaaaaccacctgttgggcttaacaactttccaataccagatgtacctccaccaaatactggaatcccaattaaacctatcattatatatacaccaactgtactaaatgcttgtcttggtgttaaaatcaaagctatcaaatttatcattattgtttgtgctgttactcctgctggagtaaatggcaatggtatatatatgtaagatgatatacacaataatgctacacatattgacattttagttaaatcttgaatatttactttagtatttttcatttttataattcccttcatatgtcttatttcatttagtttatatgtacatatacaaagcctctattaaagctttgttttagtataaaataaagacgtttttttgtcaaccattacaagtatttaggtttacgtttaatttataagtaaactttatactgttactttatattttaatagtcatttataaaactttgcttaaaaacagctctatttagactatacttgtaaattataatatgatatatttttatataagattttattttatataaaaaatagtaacaaatagtttatacacaagatatttaaaaggaagtgatgatatgaaagttaatgaaaataatataaataatatagatgaagagttagatgaacttagtaggaaagtttacttagagtcaccagatttttggataagtatttctgacaaaataatagataaagtatttgatgaaatgttattattttttgcagttaaatataactatttcaatatagtatgctttgctattgaaaacaattatctggatttaaacatgccttcaaaaaacaaaaaatacactaatataatggagcatttgttagatacatcaaaacagaatgaagataaaaaaatttataattatcttctaagcttaaataaaggtaataacctagatgaaagaccaattttagatgaattaaactgtaatattagtagtgatacttttgaaaaaaaagatatatatcttccaaagtacttatgtccaagttgtaattctaatatatttgatacaggttataaagtatcaaatgacataacatataaattttcttctaaagaagctgaacctattgaaatgtctagtgaagtttcttctatcagatgttgtaattgtgatgaattattagaagatattacacttaataaactatataacctatgtaaaattcaaaactgtaataattgtggttctaatttaactaaggtaggaattattgcaaagaaaaaaatgaactttgatgagaatactgaaaaatttaaagatgtctcaacatcttactgttgtggaaattgtgactctgaaataaacttatctcaaagagaacattttaagatttaaatatttataggctaaagtaataagattacattattagatactgtataagttttttaaatctgtaaaaataaatacacttataagaattaaaattgctatgaaactagttcttgctgaactaatttcatggcaattttctataatctaataattattaaattttaacaaacctttattagcattccataattattcaaaattctttcaaataccctatagtttataggtgaaagtatctttaatattatatcaaacttattatctttaaatagtaaatttgttaaatctgaaatacaccatacaattttattttcctcttttgtagctatatcaattctgattaacttacatctataataaatatctttatcttcatatagtctattttaaaaattactcttataaaaatcaaatagaaaataaattaattattcttttaatagaatgtaatcatattatttactatattccattatgtactctttaaatcctgaatcttcatttacttgttcttttactatattaaaaccttttttattataaaacacaactgcttttttattatctttatatactgctaaacttagacttttatattttttagttgcataatctaaaagtttacctccgatacctagattttggtatttgggttctataaataaagctcctataaagcttttatctattatgcttataaatccttttatttcatctccatcatcatatacaaatgtatctgatataggtatatattcgtttttaacagtattgtagttattttgccagtattctttacttataaagtcatgtgctttgattgtacttttttcccatatttccatgattttatttatgtctttattgtttaatttctttatcataaattttgtttcacctcatttttgtattgattttataatgtttataggtaagtgcattttatttagatatgatttagttaatataaggtggatgttttagtatatgctattgtttattctacaattttatatactgctttattaatataaaataagtttctaaatactcgttgatattgctaatattctacttatctaccacttagttgatataaaacctgacactgtgtcttgtgtgagtcttttctttatcctatttacataccacttagttaatataaaacgattaagcccagtaaaaagactcgaatctcttatcgcatttacataccacttagttaatataaaacgcaaaaaatgttgatattcccaaaattaatattgatgaatttacataccacttagttaatataaaacattatagaagtacatatattgctgaaaaacctcttgtatttacataccacttagttaatataaaacagttagtgatatcaatatgctaagcaatatttttacaatttacataccacttagttaatataaaactttatatttcgtcgcacggattcgtgcgaagggttggatttacataccacttagttaatataaaactaatttagttatatccatttgtttaacccaattagtatttacataccacttagttaatataaaacgtttcattttgcactatatcaagcttagtatacaatgatttacataccacttagttaatataaaacttttatatttaattttaaagattaaaggtataaacaaatttacataccacttagttaatataaaactactagaattattaaatgaaatgaacaataatattgtatttacataccacttagttaatataaaacgatttaaatgcaacacaaattataacatctaagaatatttacataccacttagttaatataaaacaagattgaaatttcaacactttcaccttgtatatctatttacataccacttagttaatataaaacaggttaaaaagcaatataaaagattgcatggaattactatttacataccacttagttaatataaaacaagtctcaataacaacagtcgaagcagaaaaatccggatttacataccacttagttaatataaaacgtaaaatgagaaataaaagtaaacaaaaaggtttagtatttacataccacttagttaatataaaacctgaaaccctcggatttagtaaccgattctatgtcgagtctatttacataccacttagttaatataaaacaatctaaaatatgttcgttaaaagggagtgtgtaattaatttacataccacttagttaatataaaacgtttcttatacaactcttaactccaagcccattttggaatttacataccacttagttaatataaaacgtataaaaaaagagttagaagcattagacaaatggaatttacataccacttagttaatataaaactataattgggatggtcaggtttctgataaggttaataaatttacataccacttagttaatataaaactgttttttagttttcgtgattcaaatggttctttgttatttacataccacttagttaatataaaacaactcatgtaacaagtattaagacttgcacctttaaatttacataccacttagttaatataaaaccccaaaataggtataattgaatacattgaaaatacttcaatcaagcaattataattcaataaaaacatcaaaatttgcagtgagcgagcagtagtgcaattgataacagttatcatacaccttcaatcccttatattccaactgttaacacctattttagcataaatatcgctcactgcaaacctatataaacatttcatcagaatacttatcaatcccataacatttctttttaattgaattaggattttttatctcataaacatagattgaatcctcgctattatcaataatattttctatttcagaaatacatttatgtaactttccatcagtaatattgccttcaaaaacagaattttgcgtccaagtcaaatattttctaagtatccttctaattctatttaacgaccttgcttcaacaatatcataagtaacaataacaaacatacttaccaccacacctttaaaactttgtacctttcatcatttataaaatgtttaattaatttataacactctaaccttataaacattctatatgaaacttttctatttagatttctatgttttatagttgtctgcatcttattttcaaattcttgcaaaaatttcttctttcctttttcacttaaataacaaattttgtcttgatattcaaaatcattcttattaattcttttattattaatcaggctaaaaattattgtgtcaactataattggcttaaaaatttctgcaatatctaaacttaaagaaaatctctttgttgatggttcatgtaaaaagcttattgtagggtcaagttgtgtcttatatatctcacttaaaacattcgtatacattatgctatttccaaaagacataagagtatttactgggtctttgggaggtcttttttctcttttataaaattcaaaatcatcttttaatatttgattaaatgatttatagtatgtttttcttattctgccttctttacccataagttctgatatttctttgacatcattcaaatcatttagttcatcctttatagtatcaattaaactttcatcaactttgtaatatctcatatttcttaaaatatggtatgatgcactttccacaaaggattttgctaagtataatctttcatttttatctaaatagcaggctgattgacatactaaactgaatcctgatacatttttcttccttggataatatgtacctgaataatatccatagtaattgtagaaatgaagcatcaccccatatttacttatgtaatttataagttttgtgtttaaatctacttctccatatatatgaatatcatcaacttgttctactggtaatatttttttctcaccttctaaattgtaatagtaaatcgtattttctttcctttttatatttccattacttataatataatagtctttatacattgttactcctccttcacaaaacaaaattcataataagcacattttgtacaataatgttttttctcaattttgggaggagataactgcatatttatttcatttatatttataagtgtgttttcaataattttttctttttcttctgtcaatatcaattcttcttgtttcttttccttaacataatttatagttccttttttctctatacccatactattctttaaatagtataagtaatagtataactgcatttcatctgcttctttcatctttgaacttatttttacttcttttacatactcgtcctttattatatctagcttcaagatatcatcaatcaacatttctttatttttcattcttttatatgaatcttcatgtactatctttccagacaatactctactactattttgttccatagttattcctttagaaaatagccatagttttcttttacatacataataataatttatttttacgccttgaacttttaatacttctaaatctattggcacaaaatcaccttctttagtaaattttagccacattgttaatataaaaatcaaataaattggtctatttcattacttataagcacacctttaccaaatatctgttttgtatgcttattttcgtgtatatcatatttatataaaagtatttttaaatcttcaagacctttcacctgtatgtcaattacattttgtttagctttatatattggtaaatttacagtttttttaattatctctcttcttgctttttttctcttagactttattttatttatcaattgtctatcatcattactatatgcatttataagctcttgtcccaactcttcataatctttgattaaagtttcttcaattttattatatatatcctctggaattactgtatatccttcaatatttctaagtatattttgtgcatctttagaacctaaactatatggcgttatagtatctaaaatatttaaagcactggtaaatctcttttcaaaagctgtaccttctagactttctttagagtatagtatcttaaccatttctaccttatatttttctttcatcttcacacattcttttccatttataaaagttttcagtagctcaagtcctttttctacaatatccttatcataaatactacctattcctgtagctttttctgtatatataaatatatttgggctattttcttcatactcacgacttctataacatctaccaaatcgttgaaatagactgtcaagtgttgaattttctgtatgaagctcatcaaaatcaatatcaagggatgcttccactaattgtgtagtaatccaaataccattactatcactatctgcaaattcttttatatatttttctaattttgctctatcttcttgtatatacatagaatgtaaaagatttaagttgacatctattccttttggtttaactatttcttctattaactcatatttttctacagcacttttaactgtatttactattacaagaacttttttattcattccactttgtattattttacctaagttttcatctattgaattttctacaatagacacacaatgtcttattttttctgtgttacatgtcaagtcagctaagttactattcattacacctcttttttttaattcatctatatatatggttggcatagtagctgtcattatcataaatctgccacctatcttatgtatcatttctataccttttaccaatacagctgctatttctggtgaatatgcttgtatctcatctattactacttttgaatatgctaatgttgagtacactttttcatagcctctatacaaaaaaggaaatttaaatatttggtctattgtggaaaatgtcagtttacaagataataactttgctaaatctacaatctcacttgaattttcctgattactttcttctaaataatctattgctgttgaatgtaacagacctaagaatgtatcatttgcttctcctactccaattatatttttagccctatcaaataatgcatttatacttactcttaatggtagtgtaaaaaatgctttatccttatctatccaaatcaaagcagtttctgtttttcccattcctgtagatgcaatcagtattatattcttatttctattagatttagcaaatgattgagcctctctcaaactaccaaactctttcattaaataattttctgtctgttctcctatatttataacattattgcattccacaacttcatgagcagaagcactatggtctagtctatgtagtattccttttaacataatatataaattatagtacttgtgatttttatctattcttttttctacactttgtagatatactttactcaatttttctgtttttattggatatctaactttaaattcacgctgtagttcataaactttatttattaaatcttcatctaatattttttgtattaaatttttaaaatctttatctataaagatatctctttcatgatgatatacaataacttgatttaatactgctctaagttctttattttttttcctgtctatataactataatcaataaatgcaggagaaagataattatggcctacattattttctaaatgagttactattttaggttcatttattttagtatccattctgctttttattaactcttgaaacggtgaaaatgcttttccaatatcatgaaattctataacaaagtcaagtaattgccaaaatatctcttcctctagaaaatctaagctatttatattttttccataactttctcttaatacattcatttgttttaaaagttcatcagtatgttctctaagtgtttccactggattagatttagcatataacatactctccctcctaatttatattattaaaatataataaatctccttcattatctaataatatatctccaattgatatagtatttccatcctcaacataataactatctaccttattccaaaccctttttttatcttccacagcattattatcatagtaattattgagtctgtaacttataccatctatatctgtatcttgtaaacttgtttttggtatatatataggcattcttatattacattctgataacttataattttcataatcatctaattgtatatcctcatctacttcaaatttattgacttctacaaatctaatatcattaattcttactaaatcttcttttctacctaatgataagtgctcgtcataatttaataaactatcatatatttcttccaataaatcaaaatccccacctatatgaattatcaaatttacattcaatagcatatgactattcattggcatagatgtaatactatcttttttataaaaatatgttgtctggtaattattaaatatactttcatatgttccctgtacacttatattaaatggtatatattctgtagcatttaatattttgtgaattaatccatttattgtagaatatggaggcagtggatatgtctctgtaatcttcatagcaaatggttttttatagcatgcagtttcttgaaataaatctaatttcaaaaccttcatattaattcaccccataatattcctttacttctttaactagttgtccaaaaaatttatctacacttaaaaaattatcttcaaacaatcccttaaattcttctttatttataaataccccatctaccattccaacataggtaaattcttttaaatcttttcctaaaaaagtaccttgaattacttcttctatagcttgcttatttattttaaatccatttttatctccttttaatttaattctacccaagaaaaatggatttgctatttcatatactcctcctactacaaatagaggagataaattttcttgtctacctctaatatttctattcaatacttttattatttctaaaaattctactactcttctacatttctctttattatcaagttctatatctccatccttacctattttagataaatctatagtcactgtatatgtataataacttaaatgttgctctatgttagcaagattaggatgttctcctattctatctgctaatcctttattatttaaaaagtccatgtcacttctatatggctcaagggaaattgcattacttaatcttacagtagcttctctagtcaaagaacctccttttttatctttctcatcttttttatttgttttcatatatccaaataaatccatttcttctgattctcttatacttatattgtctttaaattgaatagtacctttttctttatcgacaacctgtaaattccaattaaacaattctgctgctaatcgtactatgtcatatcttaaacactggcgagatgcaaatgtatatatatttccatcatctctacttaatttttttaattctgatatattacctatcccttccccatagtttaaactttgagcctgtgctattactgtaaatgttaaccctcttttcatcttatttttcctccttttcgtttggtagtttgtcttttccttcatattttccagaaattaatccagatataaaagcatgacctatagattcaaagtctaaatctttttcaatttctatatctaaaataaatgctggaatctgtttttcagctgacataaaaactcttataattgtatccataaaatcacttttatttccgactttaactgaatttaaaagtttatagcttactccatctattttatttttagaatttttattaacaaaatagtcatgtatatcacaacctaaataataaattattctcagcttttcatcattcttctccaaatttttactatccattttatataccccctttttgtagctatttattaatgctcttaattggactactctaaaacaatctattcctgatatatttgatttgttgttgctttccatatcatttttaactttatttcttaaaatgttattagttagatgcttcaagtccctatttttcaagagtaaatctagtacatttgatttaagcttgtaatcatagatactttgtatttttttatttgcatacttgtctgtaaaaaattttgctaaataagttggaatattaaaataatttattttacattttttagaatctatacttgctttaaattccacaaaaagtatattacgaagttgccattcactttttaatgtattttcttctactatactttttataagctgattaaaaggattttcatctttggaatctgaatattcacttttttgagcttttaaactattatttctttcaaaaagctcatttatagaagtatccatgttaacaaataaataaaactcattttcttcattaattaaataattctttcttgtataagtagcccctgctggagtacagaacaatattagcttacaaatatcacatattgatggtacatacgcctgattccaaaacatattcctagcattattggtgcttactccaagtggagcaaaattactttctgagtattcatctaatattcccttatataaaccacacatttcacatacttctaaactatccatatactcttttatatcttctatgcttttatttttctttataaagtttttatttatttccttcataattttttctatagtatttatactagacttactaacttttttttcatttatatccttagctatactatttaatctatcatttaaatagtttttcaacttatcatagtcattctcttctaataaatctgctaactctccaaaatatataatttgtcttaaataatcattaaacattatctgttttaatccatctaaatctaatttcgccttagcaacattaaaaaaactaacttgtccaaaataattatcttgaactacatatttataaagatttgctgtaagcctgtcatttattgattttattttaaatatatctatagtctcatctactaaagcttctaaactgtcaaattcatcataactttttatcttagacatgctatctagcttctcttttatcaggttaaatttttcttcatcaaattttttaatcttatcattttgttgtttcacactatctttaattttcttaattccatctttgattctatcaggcttagatttaataaaatttatactgtaatcaatattttttttaattctttttgatacatcatattcatccataaagtaattaaaataatactcatgaaagttttcaagaaataagctatcaaattcgatataatcttccataataaatatttcagcttgtttatctgctttctttattatatttaaaaatccaactatacccatattaaaaaaccaatctcctctataaactcttaacttcatttatctcacctccattctaaaatatctacatctccaaatccctgagcacgtctaaaaccaattcctagattgtagataagatttaaatcatcaatatcacctttcaatataaatttacctttgtaaccattaatatattgatactctttacctgttatttttttaaattctcttaagctctctttaactactatctttttgagacctatattttcaaattctaactttctttttaatccatttcccctataatttttaaccacttcattagttatatagtttagttcttctatgtatctatcatcagttatctccaagaattttccttctttagactttacacagattggagacaatgcattaaatagtaccctttcttctgttaccttcttttctcttgataaatcgattctaattcttgtaagttcataggctttatataaacattttttagaagtcattaacccattgtatatatgaaaacccaattctaaatctggagtacttatatttaatattactttatcttctataataaaattgtcaccttcaatactatacttttttatataaaccgaaaatgtaaaatttttagtttttttattattcttttctttataatagtacatgtttttatagtaatcttcattagattttcttattgcttcttttataatactcataaagagcgaattataagatattggtatacaacctgtactaaattcaattttcattttcataatatcacctctctcaattaatatattaacactagaccgtgaagtatattggtccaagtataaattatttgaaaaaatcagtaaatttttttcattttttcaatctctgacaatatatcatttctaagtctatctggttctacaacctcaacataagctcccatacttaaaatccaactttttatctcctcataacctctcattttagctttaaacattatagatttatcatcatattctatgatttgttgattattaacccaaactttttcctttataattattgaaaatggatgactaatttttataacaacattaatttcttctcctttataaattcctatactatttttactatattcatcccaactaaaacttttatctacattatatttttcttctaaaaccttataatctttaattctacataatttaaagtctataaacttaaatcttttttcacaaaaagctaccatataagtatctgatttataattaaataaaccatatggatgaacaattctttcactatttcctgaatttaatgaataatattctatccaaaatttgtgttttgtggtatatgctctaattatttcattacacttatttttttcagacttataatcacaattacgttgtgcttgaactgtaaaataatccatatatgtatcgcttttttctcctgtatttaatactgcttttattttttctacaatattattaaattcatttttgtaaatatcattattatactctaactgtgaatttatcatatctagaattgaaacttcactatctaataatttaattaatgatatgctattacatttatctatttcataaccaccataaatcccaggtgttgaatttataaatataccagcttgctctaaatacatcttgtaactttttatttgcctttcacttacttccaactcttctgataattctttgcatttcattttgcctctgctttgaattaatatcatcattctaagtgtattagctaatttactaatgagtaaccccccctaataacattaattgatatttttattatttatttctacacatatgtacatataacctctttatattttatataagtagaatttttttataattttgacatttaccatattatattttatatttgtacaaaattttaatagttaatacaataaaaaatattactgaaaaaataaacatctataattccagtaatattaattaattttaaaccctttttattatcatttaataatagtaactaaaaattgactaaatttaaccttatctcttttaaataattatttcttacaattaaaaaataaactatttgaaccaagaacaagcttcccattaccaaaacagctgatgatgctacttctatatcaaaagaatttttcagtgcagtaagggcaaatattgaatgtataacagccactacataaggaaacaaaaatactattccaatctcaattgttgaagcttttttaatctcattatatgtcatccccaatttatttaattgctcatactttttcttatcaacttggcaatccatataaaatttattatataaaaaactacttgtagtaacaaagaaaattaaacctataaatattgctaaaaatataaatgtagaatatattaatttcccagttcctatcattaattctttagagaaaaacaaatatggttgcatccctgactcattattaaatttattttcaaattctctgcatatctctatagttttacttgaatcctctacttcaaatgcagtaaatctatccactataaattttgattctatactatcataaaaattatcctttaccacatacatatttttgtaatatgctggcataacacattcttccacttgttttgccacctttaaacctctattccctacaataatattttctttgacgttattatttcctggtaaacttgatgataataatgatatgcattcattatcttcaaaacttataggcttaacccctatagtttctgtaatttctaagtacttagattctttcataattctgacattaaaatcacttttcttgggaaatacagttttaaattcaccattagtccttgtatagtctacattctctttttttagattattttctataaacatcattctttccttgtctttttctttgctatcaggctttttagggtcattatgcaatgtcattgttgaataatatattgtgttaggatatattaaattaatttgacgctctacatctttccaaaaggaataaactgtacctatagcagtaaatgctactgcagaagttatagttatcaagaaaaatattctagcattatcctttaccttataaatcaagttcgaaatccaaagcatatttgtattttttctataaaatctcttgtttagttttagcttcttcataaaaaatacactaaattgagaaaagaacaagtaagttgctactatagtaagggatgtaactggaactaagcgcagatatgttgtatattggtcggttgaggtaatagcattataatacgctattataaacaaacaaatacttaatatagcaagcattagtgatgttttaggctctggttttggagtttttgtacctttaagtaacttcaacacctgattttctttaactataaaataagtaaatattgatgttaatacagctaaaatcataaaatagattaaagtagacaatatcgcattaaatggtatatagaattttaatggcgataattctaaaaaagtagacataaccactaaaaatatctttgcaaagattaagcctattattattccaattacagaagatactatatttattatcatattttctataaagattaatttcattacttggcgttttgatatacctgtaatataaagtattccaaattctttatatctacttttaagaaacacactaactgaataaaacacaaagaagaataagaatagatatgcaattatcttactcatcttgagaccttcttttaaataatcaggaaattgagatacatctaaatctggatgacttgtaaacataataaaagaaaatagcagtgaagatgatataacaatacttgctaagtatcctaaatacgctttaatatttcttgaaatattgttaatagcaaactgttttatattcattagttatcgcctcccaataatgtaagtacatccattatctcttgataaaactgctctctactactacccttatatatttcattatatatagacccatcttttatgaataagattctactacagtagctcgctgctaatgggtcatgagttaccatcatagtagtaactttattttctttatttatcttttgaaatagctccattacaacctttgatgactttgaatctaaattacctgttggttcatctgctaaaagtattgatggattgttaatcaatgctctagcaatagcagtcctctgagcttgaccacctgatacttcaaaagttctttttcctaataaatcttttatacctaatattgtagatacttcattcaatctctcatcttgctcttttacactgaccttatctaatgtcaatggcaatactatattttctcctatagttaatgtatccaataaattaaaatcctgaaatacaaaacctaactctcttcttctaaataatgcaagttcctcacctcttaacaataaaggattctttccctttaattccatagttcctgtagttggcttgtcaatagtagaaatcatatttaaaagagtagtttttccactaccagatggacccataattcctacaaattctccatcttctatactaaaatttatgtcatttaatgcgttgaaaattatttttttaccatatactttacttaaattatttacagttaaaattttcattatttaactatccttcctaatttaatttttgaaataacatatatataattgttaattataatttatcttagtttaatttttatagataataaatctattttttctatacactaattatgttagtaaaagctaatactgcaagtactacacccatgattattctgtatacagcaaacactctcattggttttttctttaaaaaattcacgaatttttccataactattattgatacaataaaagctactataaacccaactaccaaagcaatccacaatgttggtgtcattattgaataatcaaattcaaataaatcttttcctgaagaagccaccatagctggtactgctaaaaagaaagaaaactcagctgctgtaggagaattaagtcctgctatccatccacccataatagtagatgcactccttgacatacctggccatgcagacaaaacttgtaatgtcccaacctttaaagcttgtattggagtaattttatctatattatctgttgaatgattcttttttctaaacaaagtttctactactaataataaaatcccacccactataaatcctataattacagattgtaaattaaacaatgattttatattatcataaaatagaactcctataatcgcaaatggtatacaacctataattacattcattccaaatctaaaaccaatctttccttcttttccgccagtaaatataaatttaaaaaattctataacgctatcttttatctttttccaataaagtactactactgctaatatagccccaagttgtattacaacctcaaacatttcagcaaattgccccttaaaatctattaaattaccaaccaaaatcatatgacctgtagatgaaactggaataaattctgtaaacccctctactatagctattatgactgatttcaatataaaaataacatctaaactcatcaataaacatccttccttttttacaaaatttctttttttatgttatttctctcatgttatttcttatattaattgtaatttagattagaaaatttaactatctgcaaacattacacaaaccttacatctatgtaaggtttgcaaataaactctcttaaattttgattatttaactatgaatatttcatttaataaattgtataataaaaaagtacaattaactaaaaaccctattgtaacagataatttacatctttatcaaactatttacatctttattaaagtagattgaaacttctgtaccttttcctacttctgattttatacttactttatgacctaaatcatcacataccttttttactagataaagacccatacctgtagattctccaaacttacgaccattttctcctgtaaaaaatgggtcaaataccctttttaaatctttagaaacaattccaattccttcatctattatacttaaaattacatatttattattttcttcagattttatagttaggtagttactataatctttagaatatttcactccatttgtaattaattgacctattataaatttcatccattttacatctgtataaacataagtaaatttgtctacttgaatcttaggaatcattccactttttataaataaccttttttcttcatttacaatactagatacaatttcatttaatttggctttttcaactataaagtctttctgaaaattatctgcccttgcaaaatgcatagccatatctaaccctttatttaatctatctatttcttttcttatattttcagttacttcttctccctcataatcttgaagctgaaggcttataactgatattggtgttttcatctgatgaatccattggttgatgaaagttaaatgttcactatgtatctttttatgctcttgtatcattgattgatacaatttatgttgttgttttaaaataactgatatatttctccccaagaatgagcttcctaaatacaaaaatgactcctccaaagaatgtattcctttttcaaacagattatatacttctctatttttataatacttatatattaaaaaacataacaatataaaagaactaaataaaagaatatataaactctctccaaaactaataaacttcataagattacagtaaataattgtcataactatgcctatataatatataaaaatataacctttataatcttttaaaaataacttcatactttctccttaccaattcttatttaatttatatcctaaccctcggacagtctgaacagcattatctatacctaattcctcaaatcttttccttatcctgctaacatttacatttaaagtattttcttctacaaactcaatatcatcccatatcttttctaaaagataatctctacttactacttttgggtatctcttgataagacattcaatcagtataccttcttttttagttataattagattttcaccatttaattctagttctaacctttctggataaaactttaatccatctagctccactattctttcgtctattttaggtgaatattcaccatatacccttcttatatgactctttatttttgccattactacatcatagtaaaaaggttttgttatataatcatctgctccactttctaaagctctaatttggtctacattgccatctctagctgatataaaaattataggtaaattcgactgttgtctaatacatctacaccagtagaaaccatcaaatttaggtaaatttacatctaatagaactaagtgtggcttaaaactttcaaatgtaatcattatatcatcaaagttctcttcaacaatcacttcaaatccatatttctcaatataatctttaagtaatgtacttattgatatatcatcttccacaatatatactttataactcatataattcctcctaatatacctatttactcatcatataacagtccaattttaatatattataatctttttacaatatataaatttaatcatattattaacttcacaattactgacttcataagtataaccatattattagacatcttaataaaactctataaaaaagtatctttttatgattaattaatcattattatcaactaatcattctaaaataaattgaaattactaattcaaaatagaaaaagttaccttaataaggtaacttaaacttttattatatttcttacttagtattattttagcatagtttctacttagcattatagattaattcttttatattcacttttttctcttgtaacttattttttattaagaagtcttgtgtatcttcaagcgaagatatatctttatctgttatatctaaactaaaatcataccaagcatataattctttagtttcttcaagacttaaatcaacttctttagctactttttccatagcttcatcaaaattattatttacatattctaaagtttccttttcaaccttcataaatctttcaactatttctgggtgtttctctgcaaagtctgtgctaacagcagttactattataccatctactaaaccttcaccatttgctacaagtttactacctgacttcatagctttaagagctgctggaccagcaatcaatgcaacatctacgctaccatcagaaagagctgctgatgcttctggaatacccatattaacaaattccacatcatccatacttaatccttctttatcaagtgctgaaatcaatacctgatgtaatatagtcccttttggacctgccaccttcttacctactaaatctgctgctgattttattgaattattattagtcaaaatcataaatccttttggtgacctgctataagtgtttaatatctttaactctactccattagatgcagctattaaagctgacgtaccacctagtgcatgtaagaagtctatttctccagcagctaaagcctgtgtttgctctggacctgtagtaatttcgtgaaagttaacttttatattatcctttttaaattcctttccaaataaatcatcctgtttctgaattatagaaggaacatttaatggtgattttacataagttaaatttatttctgaaagtttttctccattattttttttagcacatccagctaaagatgctgttgcaagtgttaatatcgttatacctatcaatagcttttttaatttcatttactctactccttaaaatattattaatttctttaaatgtctttatttgatttcattgtcattaaaatatctttttttaatttaatatagtactctgaagttaaatctctattataaccatcttctatattaaattcttttatttttctttcgtctgtgaaaacaactatttttttgcctatctttaacgcttcatcaatatcatgagttacaaatattacgcctttattagttgacttatgtatttttataacttcattttgcatatcaatccttgtaaaataatctaatgccgaaaaaggctcgtccataagcaacatatctggattgaaagaaagagctctagctatgcttactctctgtgccatacctcctgacaattcatttggataagagtttttaaatttctgcaagttcatcatcttaagatatttttctacatcaatattacttttcctattatatttatttgatttgttcaaattatcatttgtttctaagcttctaaaattatcatttataattttaccaataattcttttattgtgtttaaattttctaagcaccttgtttaaaatagtattttttctttgattatgaaaagctatattttcacttacgtttaaccaaggcattaatctgctctcctgaaaaacaaaaccaacattaggtctatactctttattatcattaataaacctaatctcaccactatttataccttcaagtgatgcaattgctctaagcaaggtagtctttccacaaccactttcacctaaaattactgttatatggtttctatctatgtttaaagagatatcactaagaactacatgttcttcattgtcaactttataacttttatataaatttctaattatatatccagagtcacatactaaattattcatatgcttccaccatctttcccttacttaccttcttcacaataatcgaaaatatgtaatctgtaattattcctaaaagtccaattacgattatacctacaataacaacatctgttctagacatttcttttccatcagatatcaagtatccaagaccagatgaagctgctacaagttctgccccaataattgctctaaagctatatccaagagctaactttaacccaacagcaatatcaagaatggcatttggtattattattttaaatattatctgaagctttgaaaactcaaatactctacccacttcaatcagttttgagtcacaatttttaatccctttcaatgtgcttgtaaagattgggaaaaaggatgctaaaactataattataatttttgattcctctcctataccaaaccataatataagcattggtattaaagcaaggggaggtgtattccttaaaaaatttattagagatttaaagtattcgtatactccactataaattccaaagaatatccctaaaggcacacctatagcagtatttattgcaaaacctatcaaaactcttttcatacttgcatatacattaataaatattgaaccatcacttatcatatttaaaaatgtactatataccttttcgggtgatggtaatatataatcactccaaataccaagataatttgtaattttccataataaaagaattataaaaaatatcagaacactctttactagccttaaaaacttattattaaatttattgaccatttacaaaccatctccattattacaaccatctttacaataaaacatttctactatgtcatacttatcttcaaagccatttcttattttttgtatttcacttaatatttcgtcttcacttgatacttcaagaactttttcaaaagtatctttgaaatatcctaatggaattggtgattcatctatttttccaagtgattttacaccttcttgttcagcaaactctttccatgtataaaacatagcattacccttatccttaaacttttcacttgcaaagtctcttaattgtgtacatggacaggttactaccaacatatcatctttactttttatatatttatcgtataaaaccctacaagtccttactaatattggttctatcataggtacttcaaaattatttatcaaattatttctttttaaaagacttatactttctggacatctacaatccaacattgtattttcagtcttttttgtatactctttgtactgcttttttacatattctaactgtggttcacattctgctattatgtaccccttttttatcaaatttgctttaataaggtgaaacttttctccatacattctttctgccactggatttattagaagatatttattcataacgcctcctattatttaatattgaatattattatcaattaatagtttaaatgagcacttaaattttgtcaatatattaatttttccttaataaaacaatttttatctacattttttaatattttaaatgaaatattaaatagtatatgtaatttattttaattaataatgcatacatcttactaataatctatttatataataatctataaatattatataataatacttatataattagtattattatttaatagcaacagttattcacactaataaaagtagaaagtttttaaaatattatgaaacatcaaatttaattttaaaattgcatcaaaaaatgaagtctcaacagacttcactttttataactcttataaattattcaaaatatttatacttccctttctacttcaaaacgtaaaaccgtcttcaatgattcaggcgatacttttctagcatcacttatataaatttcacgatgtgtgtaagattttcttataagtttattttttttgcaaaattcgttcataatgtcaaaactttctggttcattatcatatgaacctatatgaagcatttgaacacatagcccttcattaatagacccaaacctaactttttcaagaagattatgaggtttcttcttctttactatatcagtagctttatccaacaggtcttgtgtaacaaaatctggctgacgtatcattatagtgtaaattaaatcttctttaataagtacatctaagcctttacttttttctcccttatcccatataccttctaaaggaaaaaccgtatagtcaaaatacccttctggtacaattccttttttaggcatggtttttattgcatatgccaaagaataaagtactcctattgcttcaataaattctttagaatttgggtctccactcccttttaacatgataaatttctgttctggtatttcaattattacaggattctttttaggtaaatataactctttatctctttttctccattcatatttcataaaaatacctccatatatattttatacattgatattatcacgctaaaagtgacaacagtgtgtcataattataaattatattataaaatcttcatcctctaattcctcatacactcctttttggtatccattacccttagttgaaaagaaatcatgtgttttggtttcagtgctaagaccatttaatacaattggatttatagcatctacagtatatagcttctcaaaccctagattttctaaagctctattcgcattgtattttaaaaagttcacaacctctttttcaagcccactttctctgtatataacatttgtatactctatctcattctccataaggctataaagtatagaatacatcttctcttctaacatcttcttatccattttatcaaatgaatcgtatatttcttgtgctagcaatcctatatacttaccatgtaaagactcatctctaagaataagcgatattatttctccactagctaccatctttccttgaccagatagatacaatggataaaagaatcctgaataaaacaagaaactctctaaaaatacacttgtaaccattgataggtataatccctcttgatttgtagtattttcgtattgagctaaaactaaatcagcctttctttgtaatgttggttctgtttctatccattcaaataattcatctatttctaaattagaaagtagagtcataaatatagaagaataactttttgcatgtatttcttccatagtccccataaaagacaagacagcttttctttgtaggttttctgttaaactcatcatagatggtattccattattcccctgttttgtatccagtaatgttaaaccacccaatacttttttatataattccttttctttattacttagttcattccatacctttatgtctttagaaacagatatttcttcaggaagccaaaattgttttacattttgttcccaaaaagcttgtgtaaatccatcttcttctctattccagttaactgcattatgtattttatgtaaattaaatgtcatatatttctctccctatactgaacacactagacactcatgagtatctcttgtcatctttgttcttgtgtaatataaacttttcaaaccttttttataggcatatatgtaatgtctagctatatctctagttgtcttttcatctgtaacaaacagtgttgttgatataccttggtcaacatggttttgaactgttgccactaaatctatgacctttctcatatccatcctgtatgctgattgataatacaacatattatcatttgttaaaaatggcattggatatattgtagtagagtctccatatgttcttacttctactggctcagtaattggcattatacttgatgtagcattttgaacataactaatgctttgagttggtgctactgccattaaatatgcattatatatccctttttcttttacttcatccaataattttgtccaatcttcttttgttggtatataaatcccttcaaataatgctcttaccttttctgacttaggtagataagattgttcatagtattttgataaaaccttgctatttcttcccttaacatattctgatttatcaaatccttcaaaagtttgatttctttctatggctattttcatagaagctttaattgaatagtatctaaccattgcaaaaaatacattagaaaaatctatagcatcatctgaagtatataaaatattttctcttactaagtatccatgtaaattcatagctcctaatcctatagaatgagacttgctgttactattgcttaccgttggcactggttttatatctgtgctatctgctacaaatgacagtgctcttattgctgtttcaactgtactttctatagttttattatccattacattggctatgtttaaagaacctaggttacaacttatatcttgtccccattcattttttcctccatacccctctatttctgaaggtgtttgatattgaaatatctcacaacataagttagacattttaataattccaacatcttttaatgtatgttctctattagctgtatctatgtacactacatatggatatccactttcttgttgcatttgtgctatttttgtcaacatctgcctaggatttatttctttttttcttatatcactatcattaaccaatttatcataccactcatccatttctatctcatcaagagaaactccatatttcttatacacagtatgaggataaaatgcatatgctacttcatttttttctgccaactccataaatttatctggtattatagctcctaatgataatgtagcaagtcttattttttcatctgcatttatctttttagtatccatcaacaattcaaaatcaggatggaatacagtaaggtacaccgcaccagaaccttgtctagctcccatttgattaaagtaactaaatgattgttctaacattttagctactccaacaacacctccagctgcaccttctatatctttgatagattcgccagatgctctaagtttagataaatttagtgcaactcctccaccaatctttgataagtgatttgatgaagatatagcatatgatataccttctgtactatcttctacagatagtaaaaaacatgataccatttctccagccctctttcttccagcatttaaaaaagtaggtgtagctggttgaaattcttgttttactattttatctgccaagtttaaagctaaatctttatcgccatttcctagtgtcaaagctacaattaacactttatcattatatgtttctaatatttcctttccatcattgctctttaatgcataattttgataaaacttatttgcactcatatatgattgaaattcaaacttatgtttatcaatcatatcatatatatttttaataacatctatgctatactgatttattacttcttttaaataataaccttcatctattaaatacttcaatctttcttctaggttattaaattttctcaactttggttgtataaattcttctatgtaactacttaaggcttccttatccttttccaattggtacttaccttgttcatttttaattatcacttgattgttaagctctatccaattcattatttaccgtccttttaacataatcttgtgccataatttcacttaatttgcttattatttcttttggtacttatcagttgaaatcccaaaattaatctataattatagaaatgcaataagtatttttcaaaaacaaaagcactacatatagtcagtgctttatctattatatactacatatagtatatacacaaatttttttatatctaaacttttattactttataattgacattatttttatttaaagaaatttttatcaactcaaatataaaaaaatacaagcttattatgtcctgtttaaaaatttaaattatctctaaatagcttaaaaatatattctgatatattgaaaaaagtactttcaagatgatattttatatattatttagaagttttttatttattgttatataattaaatatatgactattttgctactacatatataaaaataaatttatgaaggtgattttaatgaaaactatttctaaacaagaattagaaaaaacacttgagaaacattatttatggcttaaaaacaataatgctggagaaaaggcagatttaaaagaattaagattagaaaatatggacttaagaggatactgcttaagtaatattgacttttcgtggtctgaccttatcaatttaaatttagaaaaagcagatttagaaaactctatttttaataattcttatctttcggattgttcattaaaaaattctatattaaaaaatgcagacttaagtggtgcaaattttagattttgtgacttatctaactcagatattagaggagctaatttagaaaattccaatttagaacatgctactttaaatggagtaatatcagatgaaagtacccctttttttaaattgtattgtcctgaaacaggagcatttataggctataaaaaatgttttaatttcagaatggtacaattattaatacccagcgacgcaaaaagagtgtctgctacatcaaatgcttgtagatgtgataaggcaaaagtactgtcaattactagtatagatggtaaagaatcttttaaaagtgctcgtgcatatgctgatgaaaattttatatatagagtaggagaaacgattgtagctgaagattttaatgaaaatagatggaaagaatcgactacagggattcacttttttttaactagagaggaagctattggttatctataaaatgctaaagttttataaatatataaacaaaataacaaaagagtatagattgtaatttcaaaaaaattataatctatactcttttttctatagcacataagtacattttatttcataaattataataaattatttatatctgcactattgattatttgagaaactttatctatatgttctatcttactatccaaactgtcataatacttcttactctcatctctatttctaaaagaataaacttttttatccagttttaaagcctcttttataatatctatattcctcttatttgtctctcctacactaaatcctgtatctattataatcttggaatcatttaaatttctaatagccaaatcgaaactctcatcacttatcggctcaaatggattttctgtaaacatctttatccccatagttctaccaatttcataatcaatatcattttcatgtattattccagaatacagacctataccttttttagtaaaagctctataaattggtgttgctttacccccaccaccaattataaaaacttcatttttagatttattactaatttctactgaacctaaaagactattaaagtttttatcatccaattcataaagcgaatttataatatcctcatctactacatcttcaggctgaccataagctatgactttattattttttataagagcaactttatcacaactttttaatgctatgtctatttcatgcaatgaaagtattactgatattgacttttctttacttaattttttcagtatgtttatgagctccaatctatgttttatatccaagtgagttgtaggctcatctaatataattatttctggttcttgaacaagagctcttgcaaccaacaccttttgtttttctccatcacttagttcatcaaaatatcttttctttaaatgtaaggcatctacagactccaatgcttcatctaccattattaaatctttcttagatagactcccaaaaaatcctgtatatggataccttcctatattgactatatcttgtacagtcattaaatcacctaataatctatttgtaagtactaaagccattttttttgataatgcttttcttgatatacaatttatgtttacaccattcaaatatatttcaccttttattggtgatataagtttagataaggaccttaatagggtagtttttccagctccattacttcccaaaagacatagtatttctccattttttacttctacatttatattacttataactaccttgttattgtatcctacacttaaattattagttttcaacatgtctaagccctatccttccttttcaccaataacattactacaattggagctcctaataaagatgttatcgtgcttattggtaattctactggtgataaaattactcttgatattaaatcacaaagagctgtaactatactgcctaaaaatattactactggtatcaaaactctattatctgatgttttaaatctgaacctcccatgactaaagtcacagggttcctgcttcatagaattttgcatactaaaatatgtcttactaattctccacaggccatccccatagttcctacggttcttacataagttatttattttgaattgttattagtcttaatccttcttttaatatatttatacttgcatttatatctctattgtgagtttcattacaactaggacaaatccattctcttatatttaagtccttcacttcctcgtttttatacccacatttattgcatatttgtgaacttgcaaagaatttacctacctttacaatttttctaccataccaattagccttgtattctaattgacgaacaaattctgaccatgatacatcagaaattaagcgagatagtctacgatttttaatcatattctttacttgtaaatcttctatgcaaataatatcgttctcttttattaatttagtagatagtttttgcagaaaatcatttctttgattagctatatgttcttgaagtcttgcaacttttaatcttgctttatttctatttaaactaccgattgtctttctcgataattctctttgtaatttagcaagtttgtttaatgacttcttaagatacttaggattttctataaattctccacaacttgagatacaaaattctttaattcctaaatctaaacctatatgattattagtattttcaaatgcttcaatatctacatcagtacagcataatgatacataatatctaccacttggttctttagatatagtagcattaagtattctccctttaggtacttgtttatcccttatcttaaccataccaagtttaggtagttttatatgttgaccacaatacataatgtttccatttgtaaagttagttttatatgaaaatctattaattttctttgatttaaatttaggaaatcctactttttctttaaagaattttttatatgcattatctaaatcttttaaggcgttttgtagtgaaaatttgtcaggttccttaagccattttaattctttttttaaattgttcaaatcagaactacactgtttataagtaaaagtttctttattgtttttataaacatctattcttttagcaagatacttattatatacaaatctacaacatccaaaagttttgttaattaactcttgttgctttttatttggatacattctaaacttataagctttttccactactaccacctcactttacttgttttttctgattattaatatattttcttatctgctcctctgtattttctgatacagtagcaacgaaataactaggattccaaagatgtctccccataatgctggctgtctatatttgacatactatatgcatatcctctaccatgagtaacttccatttttcatcacctatcataatattaaaatatgcaattacttaaaacaagtattttgaaggttttttatatttaattttaaataacatatataagaaccataagtcttaacttttatcatttttgaggttgtcgttcacataagttcgctactacctatgcagttctcttatgaacttcttacactttcatgcaagcacagactatatcttatccttcggcattatccgttaaggtctacccacttccactaccaatagcttgtagtgtacttccctcaagaggaatagtcgttgaagtttctcctattcggagcttacctgctgattgcccattttaaagtacttagggtttaaccttataccatctaaccaattttttctactttcgtaactttcacacttaggtttatttcatccttatgttttagtttggttagctttaggggtttccagcaattcaagtagtattggataggttctatcctatctctacatataggtttccctatatgctgactattttagctactaactcatgactaaagtcacaagtgtgcgtagctattttttaatcaattttgaaatttgtggcactgcaagtccaataaaccctataggtcctgcaaatgctgatactattgctgctaatatactagatataaacactatcaaaactctaaaaaatcttatatttatgccaatactttttgcatactcttctcctaataaaaaagcatttaaaggttttattatgaatacagtcatcaaaagacctaatataccaactattataagtatttctaccttttcccatgtaaatccagaaaaacttcccatagaccacatagtaaattcttttaatttatcactatttgcaaatgattgtaacacatttgttataccactacatacatatccggtcataattcctattattaaaagagttgttatattctttaccttatttgcaaataaaatgactatagacattacaattaaagctcctataaaagctgctacaaatatactcattgaatttacactctcaaatcccaatgtgtatcctcccaaaatcatgagagctactgataaagtagaacctgaagatactcctaatatatacggttcaactattgggtttttaaaaaatatctgtaataaaatacctgatactgctaggcatgctccacctaccatggttgcaagtactctagggattcttatattgtatattattttataatgttctgtattatccatacctcttaatacaacatctattacttctttaaattcaatttttacagagccaaatgctacacacactaaaaaagtaagtatcatacttataattaatactataaatattgtcgtattccttattctcattttattgataaaatccatttgtatactcctcttagcaaagttatattaactaaaatctataaaacctatctttttgtgtcctctctgtactatttatcataatttatataatgtttgattttttcacctgtagtacctgggtggaacatctcaactaaatctactattaattcgtccgtcttatctactgattgataataatctggagcaaacacccataggtttccgttttttacaacatccaaatcagccaatacaggtgcactagattttatagaatctaaatttggtgcataatctgaacttgatgagtatacaaatatatctgcatcttttgcaacttcatgcaattgttcaatacttactcgcccttcatttgaatctattgaagcacatgcatttattccaccagccatttttatcatattatccacatatgaatctttaggagctatataagcacttccttcatatacagatgcccatacaactttaggtttagctttgttttttatttttttacttacttcttctaccttttgtacagttttatttagttcactagtagccatatcttctttatcataaaatgcagctattaaacttgtccactccattcttccaaatggattttgctctttatactcattgtctacaacataattaagccctaattcttttaatttgtcaataaattttgtatcagcctctgataaaccactactcactatagttaagtcaggatttaagtctactattttttcataatctggtgctaaatttgaaccaacgtaatgtatttttccatctttcattaaatctttaatttctttaatagtccagtactgctcttctgttgttacggcttttatactatctagttcatctattgttctcagagaacaagcctgtgttgtagatgctattaatacattgtccacaggcgttctaactatattagcatttttatatttttcaggaattttaatcttctttgggattaaaatcagttctcgattatctccatcagttacttttttaattccatcttctaaatcttcaacactaaatccactagcatattttaattctaatttcttaccagtactagcttgtttattctctttgtcacttttactacaccctataagacctcctaccataaaaattaccatagcaattaaaaaaaactgctttaaaacatttgatttaaatttcatctctttcactccaatatcttattttttatgagtggctaaaaaactttaataatatatgctttttaaagtatacttattaaagttatcctaaagtcatctttaataagtataaccttttaataaaataaaaaacttctcctaatttaataaggagaagttcatatatcaactttacaaaaacgaattgatacttcattttattataaattacaatctccaccctaaattgaacttatataatactgggcaggtctcctgactcacggcttttcctccatcacccttcccaaaatttttataaatttcagtggattttgatttcgtatccgtatacagtagcgggggctgtagtgaattttcatcactttccctattaaactaatatagtaccctagtattattttaatttaatttttattaagataattgtaatttattgttgacctctttgcaaggttgatttaacatatatttaatttattcatcaattttttaatttcacatacttgtttttcatttggttttacaaatggagcagtcatataatcacttatttgtaaccctctgatattcatagcttttttcattgctggtataaatggattggttattaagtaaaaatccattgctttattaatatatttttgaatttctataaccttctccatatctctattattgtaagcttcagcccatttggagcaaacttctggaattaaatttgataatccccctatacaacctgctcccccagacattagattatgtataaagttttcatcataaccactataaaccttaaattctgggaactctattttcatagtatttattaaatctctggtatgtcccatcaaagttactgtatccttatatccaactatgtttttatgttttcttgcaagtcttaatgtaagttctggacttaaatcataaccagttctatctggataattgtataaatatatttcagcctctgtattcttagctatttcactataaaataactcaatactatcatcatcaagagagaaataataagggcttattatcataacgccatctgctccactattatgtgcatagtttgaaagttctatagattcatttatacacatacgacttgtacctataaacacttttactctcttatttacatgactagttactaaatctataagttctttttgcatatccatagacatattaaagaactctccagtacttcccattatgactagtccatctacacctccatctataagatggtcgtacacttttttattaccttctttatctaaatttccttcttcatcaaatattgtaacaactggtgtcaaaaattctgctttcataatttaaactcctaaaatttattttaatatgttcattaatacatcagatttagctttaatattaattatattaaaacatttacttaatgtaattttttaaaattccaatactctcaatctcacattcaactacatctccactactcatatatcgaggaggtgaaaatcccatccctactccagaaggtgttccagtagctataatgtctccagcctctaaagtcataccttttgaaagttctgaaactatgtctgaaacatctgatatgaataatcctgtattagaactttgtctttcttcaccatttaccctactacatactttaagttttatgggaaaaggaactgcacttttatgtaaaatacatggacctaaagaggtaaatgtatctaatccttttcctctaaaccattgaacatgttctttttgcaactttctagcagaaatatcatttataacagtgtaaccaaagatataatcttctacctcttcttttctaatattaacacctgttttacctattactactccaagttcaacttcatagtctagttgattatttatctcaaaatgaccatctatctcatcttctggacctattgcctttgtcacacgttttgtaaaataaaccgttttttgtggctcttcaaaactatcatcaaagtgagtttgagtttcttcaagatggtctttatagttcactcccacacataagatatcatgtattggtttttctataggaacatgtacagtacatctctctcttttaaaaacatcataattatagaatatactttcatttataatagttttcaacttaataatatcttcactagatacattttgaattaattcatttaaatccttaaaatttctactgagatttaaagagttaacatctataataaataattcatctttagaaaaaactccagttcttttacattcattttctccttcagtaaaacttacaaacttcataatctcaccctttattaaaattctatgtatttattttcttacttaaagattatacatagttgcatactctagctattgccatttcagtatatccaagggactctgcttttgattgttttccatttgctacatctacaaccatatttaacaaatcatctgttaattcttccattgtttgtggaccatagataactggactagcatcaaaatccatattatcttccatatttgcaaaagttattttatttccagttatttttattactggtgctattggatttcctgatggtgttcctcttcctgtactaaataccactatttgtgctcctcctgctaccataccagcaacagatgaagcatcatttccaggggtatccattataacaagacctttcttatcaatttgtttggcataatcatatacttcacttatttgtctatgacctcctttatgtatacaaccaagtgatttttcttctaaacttgttaaaccaccagctatatttccaggagatggattaccttctctaacttcttctccaaccaattttaatgaattttcatatctatgtactatatgtaatattttttcttttacttcttcatttactgctctcctagctagtatatgctctgcacctataaattcagtagtttcacttaaaattgatgttgctcctaaatcgacaagtttatcacttaattcacctattaatggatttgctgctaatccacttgttgggtcagacccaccacattcagttcctagtataagttcagatattggaaattcttcttttctaagcaaagaagcttcttgtgccatttctctagcataacgaacagctttttctatagtttttaaagttccatgttcttcttgtattacaagagtttttattggcttatttgttctctcttttattgcatcaactaccaaatcattttggcaattttcgcatcccaaagatacaactattacaccatatacatttggatttgctgcataaccagccataacatccatagttaattgttggtctgaatgtacttgtgaacatccattctgattattaaaggtaactgccccttgaacttgtgatgctattattctagttgtatctgatgcacacacactcgtaggcaatattaatatgtggtttcttataccaactcttccatctggtcttttatatccataaaatttcatactgatttcctcctaaaatagtctatatactttttataatttttatatattataatttttattacactcactaatcaaacagctaaaatcctatttaaaaactatttgacactaaaagcaatgaatacaacttttataactctataaatattattttatatattagtcataacttgtttatccaaatcctctctaacacttctaacattatgaatatgtacatgttgaccactttttatttcctgatttgcttctcctatatgttcaccatatttagtaactttatcaccttgggccatatcttttatagccaatttatgataaatagttatattatctagtgctgtaatcgtttttactgttttgtcttttaatttaaaactaatttcattacctttagctattgcttcaatagctactgcaacattatctttttcatcaattatcactgcatttatcattattcttgctctcctttataaataatataattttattaatatcctaaaatctaattaaagaatttattattttaccaacaactcactgtaatataaattaagctgttattgtaccatcctcattttgttttgggaacttaggacatccatacttcttagcccaccaactagttataagaggtactaatattgcagtgacaactactgcggctgccacttgtgttgtagctgttgcaacatatggttgccatgatgggtcaactaatgcaacagcagcaggtacagcaattgcatttccagcggttgtagctacagcccatcctgcatatcctggacgttttcctataaatttatcacagaatactataaatatacctcctacaaatacagatattaatccaagtaatactcctgataaacctccttttagtatacttgcaagatttatgctactaccaagtgcaaaccctacaaaaggtacgagtaaattacaccctggctctaaaaactctttcatttttttgtcaaaatttcctattatcataccaacaagtattggcactattgcagctaataatgacaacaatggcacatttgcaagacctgaagtcccaagagctattaatgtaaaaaatggtccatcatttaaagtaagtaaactcatagttgcacaatctgtttcatctccatatgaagtcatcaatgaaagatatatactaccattactatttgtaactgcacttataacagccaatgttgtaagaccaaggacaccatccattccaaatagctttcctataagtatacctatcaaagcacctatagcaaatttagaaccaagaagtataccacctctctttaaaacttttggcatttctctaaattgaagctgagttcccaagcataccagttgaaccccaattatagttgcagacccaacacttgaaaatactgctgtcgtaaacgaacctatttgtacaatatctgggcaaaaggtattaatgaaagctgctataaacattggcactatcatcatacctgcaggaatttttttaataaaatccattatcataaagttaatcctcctaaaacatgatatttaattactcttattaagtttttagctttaattctaacggccgtttcggttcgtatttaagaactaagtttttaattacgaatctttgaattaatgatagcattttcctatttatgagtcaataaaaaaaataaatttttgtcaaatttttttcaaactttctgataataccttgtatattatcaaatgacttccttatatgcaaaaatacagcgtatttaaaattatatagtattcaaaactataaagtttttatacagtgtaaaaaatagataaaatataaattcataatattttgatatttacatataaaaataactattgcatatatttacttaaattatataactaaatatcacttactttctttaggtatattttggaaattagttattccttaatgtacagtctaaaaaaatatctatctgtatctaaatcaagagcttatttatatataaatttacatatttattttctacattgtaaaatatcgtatagtgtgctaaaatcaacatattctaatactttaaattaataaaaagagggggaaatttatgacttcagataatcatcgcccaacagctaggatattagatattttagaagcattagcagaatccgaaaatggatatactcttacagaaatagcagatgttatcaatgctccaaaaagtagcatctttcctatagttcatacacttaatgctagaaaatacattactattgataaaaacacatccaaatattctatagggatacgttcttacacattagggtcttcattttttgaaaaaagaactatttttaactatataattgacgaaatgactaatatagttaattcctgttctgaaacttgtcagcttggtatacttgacaataatgaagttctttatattggaaaagtagattctccagaaccaattagacttatttcttatgttggaaaaaaaatacctgctaattgtacaggtcttggaaaagctcttttatgtgattttgacaaggaaaaactaataagcttatatccagatggtctaaaaggttttacagaaaaatcaattacagattttgatgttttatacgaccagcttcttgaagttcaaagaacacaaatagcttcagagtgtgaagaatcaatggaacacctaaaatgtcttgccgtaccaataagaaaaaatggatgtataagagctgctgttagtgtaacactgcctttatttagagctaatgacgaaaaaatagaactgataaaaaaattactcttaaatgctcagaaaaatattcaatcaatgatggaagaacgtaatgaagacattgtaataaattagattaatattctgtatatggaagatatcaaaacataataattaaaaattttgttttaaactaatgtatttatttgatttatactataaaaacaaagttgctgatttaactacagtaactttgttttttttataatattttttatatttttattgacatgataaaaatactatgttaaattctaatcataatcgtaattacgaattaagttcttatataagaaccagtaaccctatctcaatctaagatacgatatattatgagtaaattagtgaaaattgttagatatatatttttacataaaaatcaatgaaaataaaaggagattttagttatgagcacttattatgtaccaccaataaatttacttgggaaaggatgtcttaatgaagctaaagattcaattaaatcattaggaactaaaaaagcatttgttgttagtgataaatttctagtttcaaatggtactgtaaaaaaagtaacagatattttatctcagatagatgtagactttgttgtttatgatgaagttaaacaaaatccaaccgtaactaatgtggataaaggacttaaaatattaaaatcagaaaattgtgacttcgttataactataggaggaggttctccacaagactgtggtaaagctatctctatattagctactaatggaggagatattagagactatgaaggtatcaacaaaacttctaaaaaatgtcttcctatcgtagctataactactactgctggtacatctgctgaagttacaataaactatgttataactgatgaagacagacatgtaaagatgataatggttgataccaactcactagctacaatgacagtaaatgacccagaattaatgattagcaaaccatctaatttaacagcagcaactggtatggatgcactaactcatgctgtagaagctgtagtagctaatggtgcttatgatgttacagattcaactgccttatatgctataaagcagatatttaaataccttccaagagctgttaaaaatggtaatgacatagaagctagagaacaaatgtgttatgcttgttttttaaatggaattgcctttagtaatgcaggtcttggaaatgtacatgctatggctcatcaattaggaggtttatatgatttacctcatggagtatgtaatgccatgctacttccaatagttgaggaggaaaatgctaaatcagcccctgccaaattccgaccaatagctgaagttattggaatggatgtaaataataaatcagataaagagtgtgttgactttgtaatagataagataaaagctctttctgaagaggttggaatcccaaaatctttaaaagatgtaggtgttgataatcctaattttgaattgcttgcagaaaactctatgaaagatgcttgtgctggtgctaatcctgttttctttgataaggagaagattatagaattgtttatgaaaatatcttaattatgtatatttataagagagtgcctcaaaatatctttgttttgttaatagcactctcttattacactttttaaatagtactctttatgaagaagttaatatataatcctattaatttgagaatcattatcccaataaaaactcaaaatttttcttaatgaattataactgttgttgtatctggtatattatcatatatccactttgcattttccgtacttaatcttatacatccatgactaagagcttcaccaagtctgccatctattatataacttcctgttgaatcatatagcacagaatgatagtaatatccacctttaattctagtagcatacttaactgaatactcatccgttccaaaagaaggttttcttccacttatataaaatatacctgttatagttggagtctcaggcttgcctatagtacattgccacttgtaaagttgcccccagcctccattatctttcttaaaaatataagtatatttatttctaaggtctgttacaattagataatcgctagtacttttaatattattttcgttaacaaatttaatcatgtcagtataaaaatacttataatctaattcatttggtttattcccatcagttgataaaaaataattaaaaacatatcctattttatcatcatatacaatcttactccaatctccatctacttgaaggacttcaaccctagatttttcaggaattactgtaattatattggaagttatagatttatcttctcttaagtttaagttactccaagcatattcgcttactgataccaaatccttatacacatatccttcttgagaattgtacatcaccttaatccagtcatcttcttcatccaatacttccattttagctccctgaggtattactgttatgatacttgaattagtagatttagcagacctcaaatttacatttgctaaagcatatttatatataggtgctctatattttttaatatttagtttagttaatttcacacatatccatcctctcatatgtctttttacaacattttatgaaattcgatatgtattcgttctcctattttcaaactttacttgtattactaataatattgctacatatacttatatattctcacctctatttatctatttatttaaatttatgatattacattctttaatatactcttcaattatacctctagccacattaaaataacttatacacttgtcaactatgactgcatcactactaactactctatctaatttttccaatacaacatctgcattttttactaattctacttcagtttcaattccccaagttttggcatgctctaatatcctatactttaaatttcctgaattagaaactggagcatctaaataaaatttaagattctgtgcattgtatttattaaaaaatttacctatcagattcaaagcttcttctgttttatctataatcttataggttcccctaagacctgctaaatctcttatatttccatcacttcctattactagagtaccaccagataatgctacctctatggatattatcaaattaaagccatctatatttacggtatcttctttgattttatctagaaaaagcctttttgattgtcttataatatttttttcatcagtacagactgctctttttaatgcatctctttgtcttatagaaaactgatatctatcaccaacaaaagtaacgactgggtctattttgtaatccctatttaataaccattctatttcttctttagcctttataagtcttgttaattctttacttgaaaaccatcttttatcactatcatcaaaccctcttttagatatcttatttatatcatttcaccaccttgctttaaagatataactgtactacattaaatacagattatttcaccttttaagataatttttaataccattatcttatccatttagattattcaatatttataattaattataacgcttaacctcacttaataatacagaataatagattctatattatatttataagtttataacataaataggtagtgttttaaaataaactttttagttcataagataatcttcttttataaaatcaaatatatttttatcatttaaaaagtaaaaaagagacttatctctattttttgagatagcctctttctaaaatctacttataatgataattttaggtttatatattaaacttatgttatacttcttttatcatattaggagatagaatatcattaagagcttctgtcatagttggatgtgcataaacacggtctcttaaatatgtatactctacttctaaatctacagctaattgaataagatggataatctcacttgaattttcacatatcatactagctccaagtatcttattggattttttatctatcactatttttataaacccatctgccttgccaatctgtttagctcttggaattgcttctactggcatctttgccactaatacttcatatcccttttctttagcttgtttaacattaagaccaactcttgaaaatgctggacttataaatatagaatttgggatattctttctatcattagttgttctagtcttatctccaaataactgattaataactatgcgataatcatccaatgatatataagtaaattgtggacctccatttatatctcctatagcccatatatgctctttattagtcttaagagtttctgagactttaataaatcctctttcatttaattctatacctgcattttctagccctagcccttcagtgtttgcttttcttcctgtagctacaagtatcatattacttgttaattctttagatttaccatctacttcatattctactattgctgattcagaaacttctttaatctcttttatatttgcattattaacaatttttacatttctctttgcaagtaattttattatttcttctgaatcctcaacatcttcatttggtaaaatgccattattagagtttaatattgtaacttctgctccaaatgaactataaataccagcaaactctaaacctataaatccagctcctataattgtcatttttttaggtaaaactcttagattcataagagactcactatcatatactatattcttattttcaattcccttaatattaggtataaatggtcttgaaccagtattaataaatatattatctgctactaactcataaatttcattttcagttttaacttgaactgttttttcatcaatgaaagttcccattcctgtgaatatagttacattctcatttgaatttaatttattatagttagcttctctgagttttgtaattaaagtttcttttttatctatagctttctcatattcagcttgtacttcatcccaagaatttatattctttgtttttacgctgtttgctgaattttctaagctttttgttggtatacatgccacatttacacatgtcccaccatacatcttgtttgacttttctattaaagctacttttaatcccctgtttgccaaatctcctgctaatgtttttccaccttttccaaatcctattattatagcatcaaatgtttttttcatataaaattcaaccctttcttgtattgtttatacttttactataacaagattatttaggtggtacaattaggcacttttttgtaaccttaaattgattcataaacatatacttaaatacttttatttatttctctgattttcaataaatgatgccatagttgccttatccatagctcctggaatatactgagttacatatccttccttgtcaattataaatgtagttggaaaagcattaattccatattgatatgctaatgctccatcttcatcaagtacaacagggaatgtataaccttggtcttttaagaagttaactacatgttcccttgaaccttctctacctaaattaggtgaagctactcctaaaattactacatcatcattgtttttattatagtctttatacagttgttctatataaggcatttcttctttacatggaggacaccatgtagcccagaaatttaagaatacaactttgccttcataatcacttaatttatgtgttttaccatactggtctgttaaagtaaaatcaatagactttattctatcttcatcattagacccgttatcattattgtcattattagagtctttttgactattattaccatcagaattttcttctttatcagtagaattttctcgcttattttcttcttgcttgctttcaattttgctattttgtgacgtattaaagtgtttgcttatacttccaaatccatttaccatcattaatattcctgatactataagtataatcccacctatttttttaataatttccatgttagattttatcttatctatagttttaaatagtttactgtaaaacatagctgtaattataaatggcaaaataaaaccaatagtatatactgctattaaaagattggcactaagatgattacttgaacttgaaaccatgactaatacagatgccaatattggaccaatacaaggtgtccatccaaaactaaacgtaaaacctaatataaaagctgttattgctttcatttctttaaacttaacattaaatcttttttctctattcaatattgaagatttaattattcccatgtaaaataatcccatgataataattataatcccaccaataaacattattaaatctttattttcattaaaaaacatactcaatacttttactgatgaacccaatataaagaatgttgttgagattccaagagcaaaaaatatagtatttttaaataaagaacttcctataaaactcgtctttccttcttttagattttctacactactatttgacaatatactcaaataaataggcaaaattggcagtatacatggtgaaaagaatgatactataccttctataaatactaaaaataaatttacattttgcaaattaaaattcctccttattttatttccaatattacaatcccatttctaaattaaaatctaactaaaaaattatgtaattttaatacatttttctactcatagcttaattaaattttcattacttacagagtaaattttagtatttatcacaatttaaatttttattgctccacataatcattttttccatgacaggaagcaatcgtaatcctgattcacttaaaaaatatgttgactctacaacattattaaccaactttttttggttgactataatcccctgttcaattaaaaaatctagttgttgaactaacattttcttactacagtctggtatagctctttgtagctctccaaatcgtttcttatcttcttgtattttccatataattatagccacccattttttacctaaaatatttgataaagcttctactggacaattatatatcatatcatctatgttgtacattttattctcctcttttctttatttaatttattaaacaaacttttatagcaatatatttattaatattataaatatacctagctttatttaattaaaatttttattatatatactcctattacaaactattttagattttatgtaattaatatatcagttttgtaaatacataacaattggtaacttttttgtaactacatcaaccctattaatatacaatctttaactcattttattaacattttattattttaaattatatataaaatcactctaatataataattctttatttaaactgcttatcctgttaaactaattattctacttcaataaattctatattaaatactaaattcatatttaaatactaaaactattcattaatatttacccaaatttatacaaattaaaaagtctggcagattaatatctgtcagactttaaacaataaacttacttttacacttataaatccaataatattgaaataacgtcaaaaggtgctatttcatatacctgttcttcttctacatcttctattgcatttacaattttcccatttctatttttaaatatttgctcatccaatatcattctattactacttggattttccactcttattataaatttatctttactgtaataagaaggataacatgctgatataagatatttttctggtaaagatattatttctaattctctacttacagttttattgacaattgatttttgaatcttattatctatacgatataaaaagaaattgtaatcctgtaattgataatttacacattcccttagataattgtgggttaaattcgcaatttccaattcatcaaatgatttagaatccatatatattgcaaatgaaaattctaatttcttaagcatttgagctttatctgttttaattcttatatgaccttttttagttgtatcaccagaagcacgtcctggtctatataataaatcaggctttcctagttcatctgtagtagcaagtaaggtcaatgcaatttcatcttcaatatgttgatactcttttattcctctagtaaatacagtacagcttctattttggtttgttagagtaatattactttccaaaggttctaaatctataggcatttcactgtaaatatcttcccagttgtctaaaactccattttctcttgttatatatccaaatggcaatgatgctatgtttttattatcttttatatcagtttttatatgaacacgtagtctatgattatatatcgtgttatcaacacaaagttttacatccatcaatggattttctttggataagacaatacttacttttacatttaatttcccattaagatatttgttttttctatcttctaatgtaagtggtagtaaagtagtacctttaaccaccaacttttcatatcctaaagttttttctgtatacactctatcaaatgaaagttttatatcctcgtcattttttaatggagaaaagtcataggtatcgcctgcattaccactatcttttaatattaaaaagtttgatatgtaagttccatctttaagttgtaaatttaagcttccatcttcatagattatcttataattatcattagatataaaagtgtcattagatttatcaagtgataccatttctttatcacttgattcaaaactaacaactttataaccaagtgcaggaagctgtacatttattcttacttttaatatataatatcctgattcttcaataaatacgttgccagcaggtgtttcttctaatacattttctctcggttttacataagtttcttcaattatagtagcatctaaattatctttaaaataaatatttttactatcacttacaacttgtatctctttatatccattaaaacgcttagcttctgtattaaatactaaaatatcatttttagataatttaagcccttctgaaatcttttttacaatagtattttcaatactgtcacatatttcatttgcttctcttatacggtgaagaatataatctgttacagtatcagttacacatccagctagactatcgtgtgcttgtccttccaaaagttttttccatgtatttataagtaactgattgcttatttcaattttactctttttagcaattactaataatggctctattcttttaatcagcttgttttctagtttatcacatgctaattttatatccattctactagaaccaattgatttatgtattcttgctaatacaggttctctaaattcacctctatagctttctagtgattctatggactttatatattttaaaaactcttgatatgaactcgttatatatgaatactttccgatatcattaatcgctttaattttatttttgaaatcacctattatatttaactggtcattcccagaaggtattaacacctcatctacatcagtatatgatttaataaaatcaatagctgggtctaagcgtccattaacatactttaatgaaggctctaaaagcataccagttccatatccatgtggcatatttactgcatatatataactttctccatttaagcttttccacttaaaatatggtgattgaacatgtttaccaagatgtatacctctccaaaagaatatattatcaagacctacatgctttaatagtataggcatctgtgcattaaatccaaatgtatctggcaaatacccaattttcatatacttaccatactttttactttcaaaaattccaatcattaagtttcttaaaatagactctcctctagcaaagaatgcatcagtttgagtaaaccatggtccaatatgtagtctatcttcttttattaactttttaatgatttctattttttctttgtgtaattgtacataatcatccaaaatagaaagttgtccatcaagtacaaaacttacatctggattacgttctaattcatcaattacatctgtaaatagttgttcactaagtactaatgcatctccagaagtaaaataccattctctatcccagtgtgtatgattaacaatatgtgcttttatcatttattctcctctgttctttatcttttatatttaagtctaaactgaatatttaacactttatttagtataagattcatattgaatatagcttataacacgtcttaaatagttattaaattttaagattcccactctgcttcatcaaaatcatcatcttcaaattcatcatcctcaatcactggatttccacgcaatactataactaatccagctacaattactgttccaactgctattgataacacatacattggccaattctctactgtaaaccatccataaaatccactaattggagttgcatttactgaacctaaaccaactgccatagctgaagcaattgctgttccaattacacatgaaggtattacttttaatggagattctaccgcaaaaggaattgctccttcacttactccaattaaacccattataagagatgatttcccagcttcacgtaactgtttattatatttttgttttgctagtatagtagcaagtcccaatcctagtggtggtataactattcctaccattgcagcagtattaggtgcataaattccacttgttaataatgcaagtgatgttgttaaagctgctttattaactggtccacctaagtcaactgccatcatagcccctataatagctgccattaatatctgatttgtaccagataatccatttaaccaattttctaatccagtatttaatgtggcaaaaggtatacctatcacataattgattaatacaacagtgattaatgttccaaatactggtactataaatattggtactattgaagctgctgattttggtaatttaacatgatttttaataaacaaacatgtatatcctgctataagaccaactgccaaagctcctaaaaatcctgcacctatatctttagcaatcatacctccaacaagacctggtacaatagctaatttatcagctatagaaaatcctataaatgcagcaattacaggaaacattaatcctaatgcagtacctccaaatccatctagatcatgtaataatctaacaatactactagcactttctgcgtatttagcatcccatatatctggtatattatagaaagaaccacctacacgagatattgccattatcatagcacctgcaattactaatggaatcatatatgagattccagttaagacatgcttttttaactcagagactatctttttcaacattacatttccctccatttatttagtgtcaattaactttaatgcatcatttattactttctctgcatcctttataggtgcattaactggtacttctagtatttcttttccctcaaaacgttcagcatttctgactttagtatctactgcaaatattactacttctgcaatttgtgcatcctttgtagttaactcattatcgattcctgtagctccttgtgtttcaacttttataaggtgacccatcttttttgaagctttctttaacgcttgagctgccatatatgtatgtgcaactcctgttgcacatgctgtaactgctataatttttcttttcatttctacatctctccttcttcactaaatatattgattatttcttgttctgaattggctaattttagtgcatctacattgtcatcatccataagtttagttgctaatttagataatagtacaagatgattgctatccttatcaatattgcttatagccaataagaaaatactatctactggtttttcatctaaagcatcccactcaatcttatgcttagtctttgcaaatattatagaagattttttgacagcatcactttttccatgaggaatagcaataccattaccaatacctgtagttgaatgttcttctctttccaaaacagacttaacatattcttcttcattgtccacaatcccattttcaacaaatatactacttaatttttttattgtttcttcctttgtatttgtatcaagattaaaaacaatttgctcttttttcaatacatctgatattttcactatatactctcctccaatagcaaatcgtacacttcctttgtggaagttgcacttaatatgtcatttatattttttttattgtcaataaagtcataaaaaacttcatatatttcatcaagctctaggtttttgtcattttctaatgaaataaagaaaataacttccaccttttcatttccccatgtaataggattttttaacgttgcaacagatatattagattttttaatataactaggattagcatgaggtgtagctattgactgaaaagacgtgtaagataaattttctctctcaattgcacttttagctataccttcttttacaaaacctttttttattaggttatctgttatatacttaattgcatcttcatagtttgaagcttcaatatttaacaatatattttcttcaaagattaggtttctgaaagatttatacttcttagaagtacaacatgaaacattttgtatatttctttccaaggttcttatatcactttcatttaaaatagggctaactactatggttggaattgtttctaactctaaataaatagtacttattactaaatctgcatcaattttactggatactaattcttgtacggaaagtactttttcaatctttatcattggaaagtatttttttattcttgcagacaataacctagatgaacctaatcctgtactgcatactagaattactctaatattttgtggaagttctttcattctttctctaaaagcttcaaaatgtaatgctatataagcacattcatcatcatttattctaatatcatatataaattcaattactttctttaaatctaaagcttgctcaaatgataaagaaaagttttgtttgattgtatttacatatgggtttttaatactaagtccatatttcagtctatttattgatgaatgtacatgtgaagtcaatccatcaattaaatccttgtcataagctgtctcatacaatgtattttttataatttcccgaagatttgatatattatttgtacttgtttcacaaggattagttgaagtattttttagttcattagtatctctatgttggtcagccgctactaaatgtaaatttatatatccaatttcagattttggtaataatattgaaaatttttcttctaattgttttgctaaataattggtatttgacatttgattattttctatattaccaatatacaaactttcttctatatattcgccttttctaattctctctacagctattgccaaatgaataactaatgactgaaattcataatcagagaactcaaattttctttctctgctgaaattcctaagaatatcaataattattgataaatcatcttccgaaaaaataccatttacatctgcctgtatcttttcaaatgcttgataaaagctttcttgctcttgcttaatataccagtttctactccaaaatttatgtataaacttagcagtaagttgtcttttatctctttcacttatatttaactttattcccttactaggtttcttatatatggaaatcccttcgttttttagcagtttttcaacttctgataaatccctttcaatagttccacgacttatatatagttcatcagaaagttgttgtatagtaatataatcattactctttaaaagtactgaatatatatagataactctctcctctctggttgtaggaatttgacttcctttattatctaggtaaggaagtattttttttaaatctccatcaatataaacacctatcttaggttttcttattaaagaaagacctatctttttaagcactgcttctacttctttaagagattttgaaactgttttttctgaaacatctaaatcatctgctattgcttttacagttgtatgaccttcttttaataaaaactttattattttaatttcacgattttgaatcatatcagttaacattttcaattttactccttccctttatctttattttaatggaaaatgtttttctaaaaaactactaatatttcctgattaaatacggtaatttttatgtattgaacactttaattttagatgataaattaaaagctgtctaaatttaatatgaaaggaaatagtttaatgctgacaataattattgctttacttcctgtaatgggatggggattgatgcccatagttgcaaatctaaagaaaagttctcctcatgaacagcttttaggtacatccataagtgcgtttatattttccactataataactctggttatacatcctgaaattacatttttttcattttgtataagtatgatttctggcatattctggagtttgggacaattaatgcagtttaaagcaattcaaattgctagtgtatctaaagtaatgccaatttcaaatggttcacaattaacttttacgacattattagctgtaatcttgtttaatgaatggaccagttctaaaatgttactgattggttctttatcaatattatgtataatacttggtatacttctcactaattatcaaactaaaaaatctacagataaaaatatgttaaaatgtgttggagttgtattattatcatctctatttttatcattatatgttgtaactaatcaaatatttttaattgaaggatatagaattatattacctcaatctgttggtatgttgataacttcatctattattgtcaagtatttttctaaagagattgtatatagggaaaatgttttattcaatttaattactggtatattgtggtcaatagcaaatttaggtatgttcataacgactaatacattgggagttacaataagtttttctatctctcagagttgtgtgatagtagccactttaggagggattatattttttaaagaaaagaagaacaaaaaagaatggcttgctatttttattggtataatactaatcatgtctggtgtctttatgttgagtattataaaataggtatttatttacactaatcatatatagttttgtacatataaattaactgtttctatttatttaaataaatttgcttatatacttaaaataatagcatatgtatttatgaaattaaaccacactctaaatataagtatatttcattaaatacatatgctataaatttttctatcaatacgagaatatcaagtatcttatactataagtaaatttaactttataaattcaccaactaatattacactatttgatattaagtttttcatcttctataagcttatctgcaacccactctgtaacttgacctgttattttaatacagtgctcttttctttcgggagacataaagttatcaccatcccatttctttgtaatagctctacaacatgttgcaccatactcttttttaatataatcatgcaaacctttagcatgctcaaacatctttggattcatagtttctccatgtactcttccatatactatacctaaagccatctctcctccagatatcgctccacaaaggcattgagcttttccaagtcctatcggaaatcctgatgctaatttagttatctctggacttaaaggttggcctaaagcatcatttattgtctgaagaactgcttcagagcaaaaaaactctccttttctaaagtattcttctgatatgtttctaacttcttttaaatattcttcttttgttttcatttgttttcctccaataaaattaagctaaattaagtttctatggtttatcttatcttcatatatttatatcaatattcctattaaatacacatatttaataattcttatttagctttagatgtagtttcagatttactaagatatataataaataaaactaaaacatataaaataatcactgtagcaattatctcttctaacttagaagcatatgaaatccaacttataaaatgacctgatttagttaaataaccattcattagtttcatacccattgcacttattgccatagggaatgtaaatgcagcaaaactcggataaaaaggcaatcttaataatttcggtaagtatcccaaaactataatataaaatacaattgataatatgaataacaagtataatactacattatttttatctgaaaaagaattaatatatccagacaataatagtgaccctggtgcagctaatatagctatacttggtaaagatggttcaggcatttccttgattatccatactctctttaaaattactggtataagaactatataagatacaaatcctatccaaaaagcaattttgccaatcaaaagttgattaaatgctggtgccgtaacactagctgcaactatcccaacatatactatataccaagatggaaataccgtttttattgagaatttaactaagaacttcttactaaataaaactattaacacaagatgacccacaattcctatgctccaaatcataatacttaattctaaagataatggttttatatatgtagcaaatatcattgttgccattgttatagttggaaatgtacttgatattaaagggttctctaattgctctttaacaccctttctaagtaatattattttgactatataaattgcatacaaaataaatcctataaatccaattacattacgtaatgattcactataagattgtaataagttacctaaagtaaaaattgacaaaatcaaacttgcaataggtataggatatttttttaataaattcaagttctgcctcctttgttactaaattatttgtgttttaattatatcaaaaagatggtcaaattgacatattatgaccatctttcttatatagaaaatatctattaagtttaattttgttatcaaaagtatctatattcttgatatattaaggtaattagtatatttattttaatcaaatatactaatttgtttattcttatctactttaatagtcttcatatctctaatgcttatttttgcatcatctcttaaagtatctatgagtaatttattatcttctttataaagcctacagttttcttctacttttgcataattaaagttagcataacaatacagacaataatgtctgcaagtattgtattgtcctatatcgacacttttaacacatccacaaatatctctttgtgtactatctttttttacctctacttcacatcctataatttttgatattaatctatcatcaatacacttactttttccaatcccaaatttacttaaattatattcttcagaacacatttcaagtattatcccatgcttatgagcaatcttagaaatttcttttgataatgtttctatttctgtaatttctattggctttatatgtaatgctttagtattaaattttgttttcttatataaatcgataaaacttattatacatttttctgtaaatccatcaagctgattacataaactcgcaaatgctttgatatgataatctactgtgtacttttcacttaagaaaatcgggtcgtatcttaaaattactctttctttgcctatttttctagacaattccttaaatgaatctattacctttcttttatctaaaatacatgtctctacttcttttccatatgatgttatagtatagtgaaaataatatttatagtcttttaatttatttaaatcatataacattggagttacatcctttgtccaaaatacaaaacaatcaacagtatgtggatttaactctatcttactaacctgttttggattcattggattaattacataaacaaaaccttctttaagtctgttaaaaaaccacttactatagaaagcaggtatatcagttcttctactcacacttactatcatatttaacctccatagtaatataattatgtcctaatatatttttaatataattatagctctaaatacttaatttaatcaaaacatttaagataattccagtatgatttactgattcatttctagcatttaaaatatccttaataaggttataattctttaaaaataaatatacattattcctaaactttcaaaactaattttataatgaaactaaaaaaggtgctattttcaagcaccctacaattttactttttaacaaatttaatactatacaaatataccaatattacattaaaggtaaacactatatattaaaactttatatcattatataatacaaattttattttatttggtttgttttatctggttcatgatgtttataataatataccgtttcttttccaattacttcagaaccaagcttctcccattttcctccatagctagtctctatttgttcacattctgaatctgttgatgctacaataagaccataattaggtctgaatatagctgtttcttcctttccatttttataacttaatttaccattatttaaccttaacaggtttccattcttttgataattaaaattaattccattaataacttctggactagatgaatcaataaatatataattgttaaagttattttttaacattaaattacctcctccatgtaccgatttaacgatataatcataggcatctatattgcatctcaatgttaattttggtatttgaagggttttaaatacataaactttatgtttatattctaagccatcatcccagttatccttattatcactaactaaatcaatattacattctgtaaaataatttccataaaataaagaatatgcttcttctactctatctttaatacttaaatatgtgtcataatctgtattataataatactgcccacatcttcttataataccagaaaaataactacctttcactgagtcaaataaaaaaccacaatacccacattggtcaatcgtaatattattaattttataacttccatatccctcataatccttaacttgactacttataagaccaactttctgtattttttcaattcttacattatttatgctagttccagttctaatcctcattccattttgacacttagatattctactattagaaataattgtgtctattcctgtatcaatacccaacccacaagatgaaactgtaatatcatttacaattgagtaatatggtatcctaattcctgtacccgaaaaaccacttatataaatattttcataatgacctagacctttaatcatattcttactattatcatacagaattgctgatacattattcatctcaacatttttttcattcttattaataatcatctcataatgatatttaggattaccttttgtcggtggttcttcatttacctgtatctcacaactatcagaatagaaatttatatttttaatacattgtttcttccctgtcaatgtaataatactcatattttctactccacgagttataaattgtgtagtctctgtaggtgaattagaatcaccttgtaatacaatttctttattaattttaacaccacttgtaaataagtattttccttttggaaaatataagacacagaaatctgtttctatttcatcaataatatcctgtaaatcaggacctatgttgtacgaaccatcatttttaatacctctttctactacattaatccatcttccatctttaatcccagttcttccttccataatattatatattcctttcccatttacttaatttgaacctaccatgactaaagtcacaggtttactacttcatagaattttacataatcaaattaattttttatattatttttatattattcaatccatgctattaccaaaccatttacattaaaactatagtcctagctctccaataaaatacatctattcaaatactacgtatttacttatttctctatcaatttataatagtgtacagttattccaaactctattttttcaccaattttcccccatgttcccccataatgagcggaaagtatattttcatctttaataattgttgacataatgtcacctacctctggtttatgcatcttaataaccttatccttactatttatatatatatttcctttttttatcttgactttatccccataatcttcatcagatataccaattccattgatactacttagttttccatcgtaaaatataacagtttgtcgcatattattgtacgttaaatttcctttttctgacttaacaatccagtcagtagcatctatattgcatgttaatagtacattcttggtttcaagtgcttctacaagatacaccttatgcttatcctctttgaaatcttcccaattatctttattggtatttgacaaaactatattacttgactccaataaattaccatagaataaagaatatgcttctttaactctattatccaacattaaataattatcatagcttacatcataatagtactgtccgcaccttgtgatatttcctgatatctgaacattggatatagaatcaaaccaaactccacaatatccacattggtcaattgtgatatttgtaataaaatttaaacctctaccaatatttttaattccaactttttttatttcttctaccctcataccatttataaaagttccagtagaaattatcattccatcaacacagccccaaaccttactgttagcaatcgttgaattttcccctgtactaattccaagtccggatgtaaaaactgtaatatcatttgctgtagaattattaggcatatcaagtgcaattccagaaaaaccactaaaaaacaagttttcataatgacctggttctccctgtttatcttcacatacaatagccgatatatttctataatttataattacattatgatgaaatctaggttttccatctgttggaggttcatgattagatgtcatatctctatcacaactatctgaataaaagcaaatgctcttaatacagtgtcttacactttttgctgttataattgctatattttcacttttaggatttttctttcctttaaaagtaaattgtgttactccagcagtgtttttaggaacattcgccaaaatataagaatctccacataaggttaatcgtttcttaatcttaacaccactttcaaataagtattttccttttggaaaatatataatagaatcttctggtgcagcatctataatctcttgcaacttggaacttacatcttttgtttcatcattacaaatcccataatcaagtacattaatccagccacttatatctttaattattatagactcttccattaatcactacctcctagtttgataatttaatcttttatctttttataatagtacatagattccccagctaatacttttacatcaatctgttcccatattccaccatgtaatttatttatttcttctatagaatctagtactgaatatattacagtattcttttttaatctaggaaccattaagtacttacctttatcatctatatacagagtgttctcgattattttgattaaatctttttcatctatatcagaaatttgaacacctcctacagaacaaatctcaccattataaaatttataagtattttcaccattttctagcaacaagttgccctttgcgcactgtataagctcatctgcttcagcataacatgttaacattactttgtttgtttcatttgccttgattacatatatcttatgttcatcaagtgaatcattttctaaggtatcaatattactattcatcaatacaatattgcaattttctaaaatatctccataaaaaatggaataagcttcttcttttctatcttccatattctcataagtattataatcaacacttttataatactgaccgcatttagtaattctggcagttatctggctataacacattttttcaaacataaatccacaatatccacattggtcgaccataagattcataatcaggttaaaaccaaatcctttattattaatacctatttctcttatttcttctattctcacattatttaagctaacaccagtagtaatctccattccatttttacattcataaatcttgctactagaaagcattgacttctctccaagcctcataccaagaccacatgaactaacaatgatatcattgccagttgaatagtatggaatttcaatccctattcctgaaaatccagaaataaacaggtgttcaaagtgaaatagtccttgtgtttctccatattctgtaatagcagatacatttttaggtggtattttctctatatcatgactatcataataaaaattaatatttttgatacattgacttgttccttccaatgtaataatacttatattagaaactcctcgggttataaaattggttgttcctacgattgattgttttttatctaaatttgatacttgattatctcctccataataagaatctccttgaagtgttatttgttgactaattttaatacctttctcaaataagtaattaccttttggaaaatatataatggaaccttctagtgacttatcagagacaatatcttgtatcatattacttacatcatatttccaagtaatatctattttactgtttaattctagtacattaatccaatctggagttttagtttcaatttccatgattaattcctcccttttaaatctaaattcttttcacagaaaaaattttttgactataaccgaagtgacttttactctttttgggaattttgagatgacaattttcattttacaacatcattacagttatattataaatcaattataatctcattatatttttactattagcaagttattcttaattttttaatacaaattttatataatgattaaaatagttaagctttgtatcaatataatttaatcccaatagaaaaacactcatttctgagtgttctatacaaatttttattttgagaaatcttatataatcttacattttaaaaattttataatattcaatttaataccttctctagtaaagttatttttgatttgcatatcttaatgaccatgggcaactcatcatacacctcaatgcacaaaaacactttgaaacatcaataatagattctctttttccaggtaaagtccattcatttccatgtatagcttttgcaggacagttctctacacaaacattacaatttaaacattttgaatcaatcaaaggatatctttcaacagaaattggagcatctgtaagtactgtacacatgctaaaagcacatccgtattcctctgttacaaacaaattattttttcccataaatccaatgccactaatatttgctattgtcttatgtggtaaaggactaatccctgattgcatttctggattaatataggctttttcaaaatatccatgttctagattgtttttctccgattgagaatacgctctatatcctttattttgaatatattttgaaatccagtcagctaattcttctactttctcctctttttccaaaaactcatcactatctgtaggtaagttattgtatatatctgtaataaatttttttgataaccctatacaaaataaaattgctttagaaaaaccttgtgtttgatttattggaaattcagatatatcaacaaagcgaacaatgtctacacctttattgtataaaatagattttaattcatcattcatatttaactcctcccccctagataaaaataacattacacattagtaaaatttattattttaattatgttaaccaatactttgtacattctttatttctactcataaagccatactcaattaaatatcttctaattgttgcaaaatcatcatatatagattctaaaatctgattaacttccttttctgaatatttcttcccacgttcaaattgttccaaaatcttagataaaattacgacctttttcttttcttttgaagaaaatacttttaattttaaaggattcatactttcaaatgatgtatccaaaatgtgttttctctcttcttcagttactacatatctttcatctaccattcgagcatgttcatggattggtattatagtactacttttattagatttatcttcaaatacagattcatatagtgctaaatagagcttagcctgttttgctttttctctgaaaataaatttttgatggcgtatagtagatgtggatactccaacctgttttgctatctccttatctggtaaatcactaataaataattgaaataattgtttttgattttcagtcaatgtgttgtactttgaatcactattaagcaattgctctaaataatcactatgttctaattccatatgaagttcaatagcttttgaagcttcaaagaatctattacctattttatatatttctcctacctcatatgtttttgtacatttaatgcaactataacaatttaaatcatcattaaatatatagcctcgtttaatatcatcaatagaaagattttcaattttcatgttactacctccatttcacaatttacatttttcataaatatattatattaaagtttattaatataatcaacatttttattttttgtttatcaattctaattatttattaatttgaaattacaaaatataaaaatatatttaaacaaaactatttagatttttagctatataaatacttatttattctatttattactaagtgtttttctatataaatctaaacaatatttacaaaataaaaaaactccttaatttataattaaagagttcttttttatacaataaatccatacaatcaatcttataaaacataagtttataggtatttataaatattaaccttgtattttaattctttatttaaactcaattacagtatctttcccaccttcaacgctattgcctacattacatgtattcatattgtactctgaatgattagttattgtaactggagtaataagtgatataccctttaattcaatcaaaggacggttaattttcaacattggtgttccttccttcacttgttctcccatactcaccaatgcctcaaaaccttcgccttttaaatttacagtatctaaaccaacatgaataagaagttccatcccattttctaattctattacaaatgcatgtttagtctctgctactactactatctttccattgattggagcatatacaatgtctcctgtagaatctatagctacaccctctcccataattttttgagaaaatacaccatcttgtattttagataactctattacttttcctgatatgggtgattttattgatttttttttaaacattttgaacataaaaactactctcctttttgcttttatccattgttagctgtttttaacttctcacctaaacttcctcctggatggtacttataaaaatctgaagaaccaaaattactactcttagataatgcacatgcaatagaatctcctaaaaccaaagtaattgtagatgatgttgttggtgctagatttaaatggtctgcttcatcctttgcaggatatattaaagcataatcacactcttttgccagtactgaatttctgtttgaagtaaatgcaattgtcttagaacctattgctttaatatattttatacagtttaccacttccatagaatttccactatttgatattaaaattgtaatatccttactttcaatcattcctaaatctccatgcactgcctctgttgcatgtacaaaaaagctaggtgtaccagtactagcaaatgtagctgccaatttcttacctatatgtgcagattttcctacacccataaaaattactttgccttcacaatttgcaatttcactaactatactttcatattctattcctgcttcatctattaaacatcttatggcattcatttcagtagtcataacatcaaccattgtttttaaatatcccataactatctcccttcctactataaagttctttttgcaatataatccatagtttttttaatcctatttaaaccatcttcaagtttttctcttgaacatgccacatttaaccttaaataaaactcaccttcttcaccatatacagaccccgacataatagcaacttctccaatatccatcaataatttttggaatttctcaccacttattttaagttcggaaaaatctatccaagcaaagtaacagccttctggcatgaccaatttcaatggttctaaattatcttttatataatcaatcgtatatttaagattctctttaaggtattttaatagttcatctaaccaatattcgcagtcatcataacagaccattgtagctaatattgctagaattgctggcgaatttacaaaatcacggtatctagtgatattttcaaatttatttctaataccttcatttggtataatcacatatgacccagtcaatgctggtatattgaaagatttagacgctgatgtacaaatgaatacagaatctaaatagtcctttgcaacatttaagataggtgtcattctattgtcatatacaatatccatgtgtatatcatctgatattatcttgacatcattattcttacaaattcctatcatcttaacaagttctaactcactccatactctaccagttggattgtgaggattacataaaataaatatcttagattttttacactttttctcaaaatcattaaaatcaattgaatagaatccattcctatttacaagatgtgactttataatattacgattgttatttgttatcacatcataaaaagcattgtatgcaggagtatttataaggattccatctccttcattacttaacatctcaataagtttgctaattgaatacattacacttggactataatatatccagttactatcaacgctacaattaaatcttttaatataccaattcgtaactgaatttctaaaatcatcatgtttccatctactgtatcccaaaactctatgatttaacctttcctgcaacacctctgttatttcaaatggaaactctaaatccatatctgaaattgtaaaaggaagcaaatccttcttaccaaatctatcttctacatagtcccactgggtacaatatgtacccaatcggtctacttttttatcaaaattaatcattacatgcctccaaatgaccttccatagctttatccatctgctttcttaaagaatacacttgagttcctataattacttgtattgtatgctcatccaatttaacaactgctataccaccagcctctttaattgcatcctcatttattaatgatacatcttgtagttttaaacgcaatctagttacacaattatctagtgataatatattagattgaccacctaaagcagatatcatttgttgtcctttatatgtagacaaatttttgaaatctgaaccatttccttcagatacttttatttctttatcctcacgtcctggggtctttatattaaacttaataattgcccacttaaatacaaaatagtatattgcaaaatataaaactgctactaatactgctattggccatcctgtagctgttcctcttaacacaccaaaacttataaatgcaattaaatctcctgtgaatcccatcaacacgcctaagtatggaagtaccatgtttgctagaccattcataaatgtatggaaagcaaataatgctggtgatatgaataagaatagaaactctattggttcacttataccacctataataactgtcaacactcctgatattaaaagtcctttaagtgcctttctattttctggttttgctgtacggtagatagccaatgcagcaccagctaatccatattgaatcatcaatttaccttgttccattttaccagctaaatcaagaggtataatctgattattttctacatatgccataaacatgttcaatgtaccaaagtacgtttctccatcaataacagcagttccacctattggtgtaaaacggaatacagatgttacaagatgatttagtccaaatggaattgtaactctttctgccactgcatatgaaaaatatcctaatggtcctgctgaagaaatccatcttcctaaactttggaatgcattgaaaaatggtggccaaacaataggtattaataatccaactatactcataactattaaactaacaattggaactaatcttggtccactgtagaatcctaatgattctggtatctttaaattactaactttatcatatattgcataaacaattaatcctgctacaataccacctaaaacacttgtattatatgtttgtatacccataatcatagcttgaccattagttgacatctgttctgctggtactaacaaatcagctcttgttaaataaaaatttgtacctatatgcattgctataaatcctactaatcctgaaaaagcaccaaactctttttctttttttaataatcctagtggaattgccattgcaaataatgctcccaagttgttaaatgcaaataatcctattgttaacatgaagtttaaaactaagttaacatattcattccctagaaatggaaccatttcaatcatcttagggtctgtaaaacctgccccaagtcctagcatcatcccagaaacactaagtagtgctattgggaacataaacgttttccctaacatttggaagaagttccataaacctaacttattttttttcataattttcccctcctatttttatctaaaaacataatcaaatttatagaaaaacctaaatcaaaaaacttaatttaataattaagtttaatgatttaggttttgcctgctcaaccagttacaatcctaaaagtcactgtctgtatttgattgtatctaataaaaaaacctaaatcaaaaaacttaacctaatagttaaattcaatgatttaggttttgcctgcttaaccagttacaatcctaaaagtcactgtctgtattttgattgtatctaataaaaaaacctaaatcaaaaaacttaatctaatagttaagctcattgacttaggttttgcctgctttatcagttacaatcctaacaaccactgtttgttattttatttatgtgaatcattaaatataattcttcttctttactaatcttatattcaaatctgtctaataccaatgctgcaatttcttcagtacacactttaggtttattgtaatttttattcactaacttatacatatcttcaatatcactatcattgtaagtttcttttcggagaatcctttgaacaaaaaactttaagtgagttataagtctagtataatttaatgaatttacatccaatttaaatccatgtacttcttcaattatctgaataacttgttttgaaaactctagtatattaataccttcatctttttgagaattttccaaaccattgattatgtgaatagcaatatatcctgcttcatcttcaggcaattttattcctatccttttttcaatttcatcaattgcccataatccaaatttaaattcttccctataaagttgttttgtctcattcaatattaagtttggtaattttataccttgtttttctctttggacagcaaattctatgtgactagttaaggctaatattattgaatcattcacttgagtatttaaaacttcattagccttttctataatttcttctgaaattttaaagtattcaatagaggtcttattaagtatttgattgtatttgtccctttgatcgtcttgaacaaaatatttcttagaaatcaaattttcatctatcaaatcgcctacttttttcttaaatcctactccagcaccagtgacaattatttctgtgccatcttctagggagcttactactacattgttattaaatatcttttttatattcactataaatcccctctaaaaaaattctctcatcacacttacatagtatagtatatttaatttaatgtcaatatttaaaattttactttcgtatatattttgcaatttaccctataatactacaataacaaaatattttttattgtcatcaattaatttgtcatattttatcatattttcattgaaatatatttaattatttcttatgtatatttaattatttaaaatcaatcgacattttatattacaaaaattattttcagttttttccagtattctcaagtattttaacttaattatatatatatttattgaaattcagattatagctttgtactaatcttttctcaaatatatacattggtaatataatttttaatttatataaattaaattaaatttttttataattttttttataaaattatttgtattatattttgtattttttataaaattattatacttgtacatcttttataacatataaaatctttttttctaattatatacaatatattttccattatgttctaatcaatttctttactatttttacaactttattagtcatattcataattatttctaattagtgtttaacattttatgtaaaatttataaaaaaatgtatataaattaaaataagtgactatactaaaaatatgatacggataaacaataagttcaacctatctcccccaaaatcaagtgagctacagtttcccccaactgtagctcattttcgtgtaatttaataaacatctcaacaagaattaattaacaaaaccccttataaaaacataacatatattaaacaagctcttgattaaaacttgagcttttttaataaaaaacagaatagtttattagataaggggtttttttatgcaattcatggatgtatctaaatacattgaaggtgcaaaccttaaagttaaaactaaaaatggtgaaactgttaaaagaatatattttaacaactctgccactccattagttttaaaaaacgtagtggataacttaaactgtgagattccttggcttacttatattaatgctccaggaataatctcagaaaaaaatactttaaaatatgaaaatgtacgctctactatcctcaaacttattgatggagacgaagaaaaggattctgctatttatgtcaaaaatgctacagaaggaataaacttcttagcaaaattttttaaagatgaaaatccagataaatttattattaccacagcaatggagcatatggctaattacctaccttttaaagttaattttcctacaaaagttgttggaattacagaaaaaggagaacttgatttatgtcaattagagaatatacttaaaaattatgctggtaatgtatctctcgttacagttacaggagctagtaatgtcacaggtataaccactcctatatatgaaatagcaagaatagctcataagtatggtgcaaagatattggtggatattgtgcaagtaattcagcataaacctttttcaatgatgccacatgaatgtgatgagcatatagattttgttgtttttagtgctcataaatgttattctccactaaatggaggagctctggtaggacctaaaaaattctttgaaaaatttaatcctgtactatatggctcaggttctaccaaatttgtaaatgataacaaaatactatatgcaaacgtaccccaacgttttgaagcaggatacccagagtattttggaactcttgcaatgggaaaagcactgaacactttaaataaaattggtctaaacagaatttcaaaatacgaaagagaattatttttatatgctaaagaagaaatgagtaaaatacctaatataataatatatggagataaatcaaataatgtaattatcccaaatatatcttttaatataagtaatatgtattacaaagatgtagcaaaatatttagttgataactttggaatagaaactggagctggagtagtaggtgcagatatttatgtacaaaaattattaggtataagtccaaaagaagcatacgtcagatttatgagggaaaatcctgtaggtcttgttaggataagcttaggaatgtacaatacttttgatgaggtggatagctttatacatgctattaaaactttggcttttaaataagctttttctattcttttttatcaataaatagagagtagttttgttttcacaaaaaaacaaattatatcaacagtcaatttcattagcaattagacactcatttgtaactatacaaactattttacactatacaaataaaaaactcattacaatgagtttttttgtttatatatgatatttattttaattacttcaatttactttaattacatatatgattcaattttgttttttaaattctccttaggcataaaacctattaatctatctacaggttttccatccttaaatattagcatagttggtactgtagatacttcaaatttctgagctaattctatactttggtctatatccaccttcaagaagtttgctttttcaaccatctcatttcctaaagcttcatatattggtgatagcatcttacaaggtccacaccaagtcgcaaagaaatctacaactactaaaccatctttattttctacttcatttataaattcattattatttattatttttaccataatatacatctcctttattatcttcttgatactaatatactacgccctatataacagttcaattaggcacttttttgtaaccgcctatttttaatagatttaatattatgataaatagatttataagattaaatatttataagactaaatatttctgatatattttatttttttcttaatatagttgacattttctcccttaaattataaaatcaaattaataactacataggtagttactaatcttttatcaaaggagtttctatatggataatataattaatgaattacaaaatataggatttactaaatacgaatctcaaatatacatatcattattaaaggaaagccctttaacaggatatgaaataagtaaattatcaggtgtaccacaatcaaaagtctatgaaaatataacaaagctattaaacaataatataattatcaatgttggaactgaccctattaagtacatacccataaaccctaatgaattattaaaaaataagaaaaaagaatttgataattctatggataatctaaagaatagcttacagatattaaataaaaataaaagtgtagaatacgttttaaacataaaaggagataaaaatatattaaaaaaagcattagaaatgataaaaaatgcaaaacaagaaattataatttcttgcccttatgaagaaattcttgaattaaaaaaagaactcctaattgcttacaaaaaaaatattaatattgaaatactacttttagaaaacaaaagtctgaaaggtcttgataatattcatactcatggaggtaataaaactacacttgaaaataaaatgctttacaaaggaattattttgattgtagataatgatgaaatattgacaggaaacttatcagaaggcagtgaggccatttcaatttggacaaaaaactctaacattttatatattggagttcaatacataaaacatgaaatttatatttcagaacaaataaaaggaggttataaaaatgaacaaaattaagattaaacaagttgatgcttttacaactataccttttggtggaaatcctgctggtgtcgttactgatgcctctaacatttctgatgaaattaagcagaatgtggctaaagaaatgaatttatcagaaactgcatttgtttcagagtcaaatgttgcagattttaaggtacaatttttcacaccaggtttagaagttgatttatgtggtcatgcaacaataggtactttccatgcacttttggaagaaggaaggcttaatactaataagagtatattttatcaagaaacaaaagctggtgtattatctgtagagcttaaggaaataaataatgaaaatatatttatgatggaacagaatacacctgaatttgaaaatttagataattacagaaaagaacttgcacaaatgataggtgtgcatgaagatagacttcttgaatatcctattataaaggtaaatactggactttggtggcttgtatttggtctaaaatctttagatgatttaaaaaatatctctccagatttaaataaaatcaaaaaatttagtggtgataataatataattggtataactccattttgtatagaaactatagataaaaagtgtgactaccatttaagatctatagcaccatatgttggagttacagaagaccctgtatgtggaactgggaacgcttgcgtatcatcttatatagtacatcacaatattttagataaaactagttttattggtgagcaaggtaactttataaacagacctggaaaggtatatgtaaatataactagagaaaacaatgacataacttctgtaaaaattggaggaagtgcttatactgttttaagtggtgaaattatgtattaatcccatacctaataaaaacaaataaaaatactagctaactaaagctagtatttttatttgttatttttatttaataatcacactctaacaaatattataattatatatatcataatattgtatttagaagtaaaattttatttttattattaattagttataaatcaatctaatacaacataattacagtagattaatctataaaacataataattacttactgattatttatcatcctcaacaagtctacttaatgtcttatcagataagaataataatatcgctgcaacaaatagtattactggaattatagtatatactttaatcatatcaaatttaagagtaaatgcatatatatatccatatcctttaccagctataaaagtagcaaatgtccatactcccataagaacacctagaagcttcttaggtgcatacttacttacaaaagagttaccaagtggtgagaataacatttcaccaagacttaaaagaataccaaacatgattatccatagtatactagctttagcagtttcaggagctccaactcctcttgaaaattctgcaccaacaagcattaagaatgcaagacctaagaatattaatccaagacctgtctttttaaataaactcatatctccttgtggtctactagcaagtttaaaccataatgctccaagaactggtcctaatactatacatacaagtgaatttaatgagtcaaaccaagcaagaggaacatcaaatcctccaacattcatgtttacaaatgctgcaccataatcataaactgcaagataagttagataccagaatacccagaaaattacagagaagaatgatataagtataatagcccaaattctcttcttatccatgcttgtaagaggagacttatctttttcttcaactttttcagcaactacaccttctttaaaaggtctctttcctgcatttccaaggaatctccatccatatatgaaccatattgcacctattacacaaagtacagctgctataaagaaacattgagaaaatccaagtacaccattttttgcaaatgttttaaggtaaagaataccaactgctatagtaccaataaaagaacctatattaacaaaagaatattgtactgaaaatgctgtatcaagttcttcttgactatcaaaaagctgtccatttaccgcagatacgttacctttaaagaatgcagtaccaatcgaaactaagattatcattgcatttaccatagaaactgtagttgcaatagaaccaagatagtaacctacccccatgataagcatacctataggtatagtatatctagctcctatccatctatctgatatatatcccccaattataggtgcaaggtatgtgaatgcaacaaggttggcttgcattatagcagcttgtcctttatctattccaagaccaccatgaactatagctgttgtaaggaatatatatattaagtactttgaagcataatatgctgctctttcaaatgagaaagttgttgagcagatataaaatcccataggaaatttacccttcttttttactgttgagctcataattttaaatcctttcttaattgtatttttattttttacgttttgtccaaattctttcttttatgaaagatataatattattattttgtaaaacaatttgtaattattattaagataattgcgcatttatttgtagagtacatattctcatggaataaaattaatacacttcttaatcataaatttaaattatataaattcactattttcagatatagttataaattaatatattctcatctaataccatgaaaaaaccttcgccatatgcaattcttattttttacgtgatagtattttacaaactaaaatcccccttttgtagcaacttctgtaattacattttagtgcttttttaaaggagtctcgaataaagcaacatatattttgttcaaataatgtttttatttactttttaaatttatatattacttcactcaaccaattctcaacttaaataaataaactactatctattcacagattagacctatttcttacacattagtttataataaacactgtgaatctaaacataaaaactgttattttaaagtaattacccatatattcgctttgatactatttattgaggttatactctttatttataatatattatttataaaatacctcaaaatatattattaataaaatacctcaaactgaaaactttttcacgaatatttatttttcacctccccttttttattttaccatgtaaatcgtaccataaatatgcacttatatgcaagaaaaaaatctattaatcgacagtaaataattagaaaaatttaaattatatttgttaagtgtattatataaaatatttcctatgaaaatataaattaaattaatgttcagaatagtttttagatatgaaatcttgatttttttattactttacttatttgctcaaatatatttttgtatgcagtatataataatcaaattatacacttcttataactgcgttgatttgaaaataatattaatagttaatagaagaaaaaatttaaattaatttttaaaaaatctattaagttaattgaatacttttttatgtatttaattaattttataaattcaattattttctaaatttaggtatgctttactatataaaaatgattttttatcttaattttctaaatataagtgaatgctatcattttaagtatcttataagcaatgtaactatatatctctaataactacttttttaacatgcttaaactatttataagctattatatttatgtattaacctaataactttttcactaaaaaataacaatctattcaaagataaactatagtacttcttctactttgtttcaataaaatactaaataaatttcgtacatccacaatttttcaggctacactataaatatacaatatttatcttagttataagtttaagaatatttttagtcttattttgtcgaatatatttttaataaaacttcataattctaagcatatttttacactgtgttttcatgtacaaaaataatgcttacaaataaacaacataaataaaacttaaataagatggattctattcaacatagtatccatcttattcattcaaaacctaaaaggattttttataatattatatattttaaaatctaagtaactcattatagtatcaatttcacttaaagcttacaatacacttattaatcttgctttatattaaaaacatctacaataacaatttaaatctttaagtgatatccatctcacacctaaaggagtgggctctccgcactattctgtaattcttcaatacaatcattcttaattttttatataatttaattatatattttattttaccaaaaccagcatacataaataatacttaaaatagattaaataaaggatactaaaacactttattgaggtatatgacttgaaatatatgaactaacttcattaggagaaatatctaaaatagttgcaaattcttcacttaataacctttctgcttctttcattatattatcatctgcttgatgtgtttttttaccaatagattttacatactctctgttattatctatacttcttactaattttattaactcttcacatttaccacctctgagtatttttttaaattgctcacttcttaatttttcattatctatccatgatgtatccatattaggaatatcatttattaatgaaagcacattaattttagaaagtaactttctcattggtactttttcattatctacaggaatttttattactgtattattagaataaataggactcaatacataatactctttttttattccatttgtaaatcgttcatttgttatatccatgactttgcagactcctgtcataccatacattatataatcatcaatcttaaacaaaaacatcaccatccttaataaaaaaaatagttttgacaactaaatccatcttgccaaaactatctgctatatattatattttaacacattttaagacttaaatgtaagtaaaacttatattattaaaattaaaaaatacattaaccattgattaatgtattttttagatttttataacaagcatatcaaaataaattaatacagcttatctcctgtgaatacctataaaattggtgcttggctattcattgagtacccatcatttcttacatcatttatttctaatatttcatcatttgttttaaccttagtaagttttttaactgctccataaggttcttttaatgaaattttatctcctcttccagaaataacccataaaattttataccctctaggtattacttgtagtttattttcacctttaccatcagtaaagtagactaacaaattaatctttttattattagcatactcaaagactggagaaaatctagtacctccacctatcctaattctatcttttatatctttttcagttctcactttatatacacgtctaatttcattatcacattctataattgtaatttcatgattatagtttttcactatactaagaacttctttaatagcttgtttaaattcttcatcactaatacttccacttacatcaagtgcaactgctatttctgccttatgacttctaagttctcccctcaaatctaaacgatttggttgtcttctatttcttcttgttatagtcttctttttattattttcaactgttcccattattctattaagatataaattccatggcaattcacccttactatttttaagtgatgatatcatactttctaaataagcaggaactttacctttttgagaactgttaataaatttttcagtaaattctctaagggtatttttatctatctcattggattcatcccatatatcatgagttctttcggggctataatcaatttctacatctccatatttatcactatcatcttcctcaccatcttcatccacttccatcaaatctaattcagtctgaatcttttctacataatattcaaaaggttcatatggttcaagttttaaggaatattttaaatttacccactctaaggtagttgcatatggtggtaaattgtttagaaatttatttactactatatccattgccatattaattgccaatgtactatactttccttttaactcctttgctctcatcaaatgcatagataatatatgatgaatttcatgtttaattgtagtctccatttgctttatgtcaagcgttaaaaagattattggattaaaatatataacatatttagctcccttaaaattcacgcctgtaggactacttatatcaaatcttatttctcttgacatctgaaacaaaaaatatccataaaaattatcttcttcttccataagacttaaattcactttatctacaagactaaaaaactcatacttaaaatcttgtggtatatccatatcaaatttctcattagcacgatttgcctttagcatagaatgagtatttataatttcacttgctttattataaagctcttttgcttgtttatcaaaataattttccatacattatccccttattaagctataagattcaaaatatgattttacaaaaccttcattttctatggcttttttatatacttcaatataactgtttctaatatccttcataatacctatcattaaatctacaggatacatttttaaaaattcaataaatctattaatatagtggtttgattcatatttatcattcttaatatttaattctaagtcttttagaatgttcatagctgatagataaagtcttgtatgactctcattttttactctttctacaatgggctcatcaatagattctcttaaaaaaacatcttcataggatattaatggttcagagtttgattcaataaaacttataaattcttctgcaataactttacctacattaccctttacaacatttaaaaatactgctctaggaatagaattatttttttctttataaactttataaattttagatactctctcataacttctaggagtagctcttacatcatcttcatttattttatgcagatattctggaaaagtggaaataaactcgataacttttctttcaataccctcatctattgcccattttatccattgtgtatggtcactctccatatttaaccaaacaaacctattttcttgggctgcatccatatctaccacttgataatcaaaatctgaaccatatttacttgatggattcattgctgctaaaatctttacatcatcatgcagtttatatccattaatttctctatttaaaattaaattcataagttcttgctgtactgtatgctcacaacgatttatctcatctataaataaaagaactgtcttacttttagatatctcttcatcaatttctcttaatttgttatgaacagcatacactgttgttttcttttcagtcttatatccattagaattaactcctacataagattctatagttggaagaccacctatttcaccctctttaagtaagtttccatcaataacaattaaactccaatcattttctttggcaagcttatttgctaaagctgtttttcctattccactttcacctactattaaaggtacttctccagtggataatattaagtcaacgctttttaatgtgtctataaaattcatttttctctctcctacataatctttaatttctcatctacagctattttttttgctgtcttacttccatatttataaataaacataattttatctattggtatactttcgctatttctatctataacactacaattcaaaaaatctctaatatacttttcctcaacatcttctttggataatacttcttttaatacactctctaattcatctttagatacttttttcagaatgtacttaatcactaaaatattcacttttaaaaattccaacattttatttttatctaaatcagttataaagctaatagctgcttcattattttttatagctataagttctgcattataactaggtgaatctatatatctcaaggcatcataacttattcttactgcctcctcttgtacactttcataaggttgttttataaactttatcgaatcataattttttcttactgctaacagttgtaattcttcacttggatttttagcatatttaattgcccatcctgcttgatttatagccatttcaataactttatcagttgggtttttgatataatccagtatactccatccctcatttactgcttttatcatcatatcttctgttggattatctataaatttaattgctctaatattattatctattgctagttcttgcatctctctggttggattatttatatattctagtacaagcccattttctttaatagctaacaatttcatttcatcagttggattatctattgtagctataatattgggattattttttatcatttcaataactctcaatttttccataatgtgcctttctttctataattatttttatatctatattaattataataatctattcctatttatataattgtttcttattataattaatatactttttaatcaaatttaaacagaataattataccaatatataaaaaaatttctaaaaaacaataaaattaagttataaacaccaatatatttctattatttcaataagtatacaattagattagaatctaacgctagtaataaaaaattactttcccaaaatagatataagcctcattttatcgttcaaataatgaaaatatatttgatttcatgcaaaaagagtgcctaatgaactaaaaagttcattttgagacactcatttctttatataaatttatatagtttttaatcgttcgcattcaaccactcagttaagacttttatatatttctcattttcttcaacgaatggcatatgtcttgaatactcaaataactcccacttactattaggtattctatcatacatagtctttgcaatatatggcgaacataaatctattgctccactagttactagacaaggctcttttatttcatgtaatctatctgtaaattcatatccagaaagagttcctgtaggagaaaattcattttgtccccatcctacaatatatgcttcagaacctgattttttaggtcttctcaggcactctggagaatcttctgtcacttcacctgcacaatacatttccataaatctttctaatgcatcattatattctttattagagtaatctccagtatttactgcatcaagcaatgctttttggtcaacctcactcatatatgatattcttcttttttgttctttctcccaaagttttgcagaagaaagagtagatgaaaggatgtaagacttaataccttttggtttatattcaatagcataccaaatagcctgcatacctccccaagattgacctaacagatgaatttcatcaagtcctagatgttttcttagttcaataagctcctctatccaagtatctgcattaaataactcaggatgcccttctacaaaggaatttccacaaccaatttggtcatacattattacttgtctaccactttcagctatcttatccaatacctcaaaatagttgtgtgtagaacctggacctccatgaagtaatactaatggcttcttcccttccgtattttctcctactatacggtaatacgttttaaaacctttaaaaggcatatatccttcagtaattttcatatttatctcctccaatttgtaattataaacaataatcaagttcattaacaatactatttaaaacctctcatacgtatttaattatgtcttttaatctttatacctacttttataaatagtataacataaaagttaaaaatctctatactaaaccaattataaaattatattaactatataattttattttttaataatagtatatacatatttgattattttcatttgctatttaaaatcaattttaagttttcttcttataataaacttcctctttgtggtctcatgttagtctctaaatttaaaattttacaaaaaattttcataaaataaaattatattgattgtatctaaacaaatagggcaataaaataattaagtatagttacttacctttcaagcaatattagttttatgttagaattttattatattgatttacaggaggtttgcatttgaataatattaattcacttaaagtaataaaattatctcttggatgttctcttgctatattcattgcttggctattaaaattagaatattcaatggttgctggagttatagtactacttacagtaaaggacactaaaagagaaactcttaaaggctccattggaaagatttatggttttcttttatgtactattttttcatatttatgttttaatattttaggatataatttgacttcattttcaatatttatatttataattataccactttgttttttgttaaatattcaagatgttattgctatgtgtgtagtcatagcatcccattactaccttcaaggagaaacttctatcaaatggattttaaatgaagctggaatatttgcagtaggaactggaataggtgtcttaataaatatgtatattccaacaaatatacataaaatccatgaagttcaaaaaaagttacaggaagaagtgagtattgtacttatagacattgcagatattattgtaaatcctaaaaaagaaaatggatatagtagagatttatataaattaaattcacttattgacagcagtatttctgaaacttacgataatattaataatactttattaagtgatactagattcttcttagaacatatggatattataaaaagccaacgggatatcttagaaaatttgtatagttatgtatctcaactaaattctacaccaccacaagctcacattctatctgctttcatacataaaataggttatactgaatttgaagctgaaacaggcaatcttcttcttgaagaattgaagagattaatgcttagtatgaaaaaccatcctctacctgttgacagaacagagtttgaaaacagagctattttattcctatgcttgactgagttaaaacaatttttagttaatcgtaaacatgctcagatgcttagagataataatttttataaataaaaaggtgagaaatccagcagttgacctgactacaaaatatcagatataatattaaatgcgcccctagtaagagggcgcgatgtttataacttattctactgtcatgattaaatcattattcatatcgaatatacattatttgaccaagtccaatattagctttttcatcagtgatttctattttaatagtcacatcattttttttacagtactttgctaattctgcaccagaacgatttttaccactaaaatctaaagaaaatggcttatcatatttaaaaggatattcaacaggttcaccttctggtgctaatgcaaacatcccatatggtgtgttcataaatcctattacagcaattgtaagatttgatgggtctaaatttgatttactacctagaaatgtaactgtattcactgatgaattaattacaacacatctaacaccttcatacattacatgtttatcctttatatctccaaattttccaacaacctttgccccgtcttgatgtggtaacatagtgtgcttcccaggtagtgctggtttttgcgtttgtgctactgctccaactgttggatatgctgtcttatcaaatggtaatgggtggctaagactcttgtatatgatatcctttcctgctgatttattagcatcaatatctacatgatacaaacgcccatcaccaaaacgtataagattccactggtggtcatttgatgtgctgtgtacataataagattcaattcccatagcgtcacacaaagctttcatgctcctagccattcctgaacatgcaccttttttagtaaccaatgtataggcagtattcgctccttctactgcattccagtcaacatatgttgtgttatttttaatgtgattataggcaactaaaatcttagcgtctgtagtcatgttctttgtaattttattgttcataaaatctgctgttgcttgtgctactgagtttagttgggcttgtgacagctttggaccatatacgctattggttccagtgacatagctttttggtgtttttgctgttacctctttggctgtcataccataaactgtcatactcatacctgagactaaaacaattgttgtaatcaataacttggtagctaacttcctaattttcttcatacttagtattctcctttataaaatattgttacttcctattctctaccattaataaagttcatttgggatttaaaaaggtggattgtcaatatgtatgtttcttcatttatacgttcgtgaaatatttaaatttcatggaaaatctaatagatattttctagataatttgtatacaatacaactcgcaaatcagggtgtttgctgttagtttgagaaaatgatgatgattaatatattcggaatctttgacctataataaataccattgtcttcaatcattaataatggtaagagtaaagagaattatcaataatacagttaaaatcaactttgtatacatttcatacattctctcccaacaacattatacttcttataatttgtatattcaatacgttttctgggaaaatataggatatatctataaaaatataaaaaaggagttgaacttaaaatttgattaaaaaaaatcaattttaagacaactcatttgtattataaaaatgctatatattattattaagtaagtcaatattttagatatttatctatttcttattgacttacgcttatagtctaacttatttgtttagttgatatataacctagttttaagcattattaatatttaaataatcaagtatcctttttgtttcttgtagtttctgttctgcctcatttaagttttcttgaattatagaaatatatattatatctatcaacgtaagcattgctattcttgaagaaatagctccttctctaagccttttttctatatttggtactactagctttaaatcactaatcttactaagatgattgtcactatatttagttatacaaatgaccttacatccttttaattttgcattttctatagactttattacttcttttgattctccagagtaagatattgctatagctatatcttctttatctacatttgaagataccataagttgtgtatgactatctaaagaggtaaatgcctgtttatttatccttaaaagtttcatctgtaaatctagtgcaactaaagccgaaccacctactccaaatatatatacatttttagcctttattatctgttcaactgcttcttttattatatctttttcattcaacaaccttgtttggttgatagtctctatgtttttgtttgtaattttgtttataacactatctatattacaatcatagttttcatctacatatgtgtattcattttctttgcccatcaaatctttagctatctcaatttttaaatccccaaaacccgaatatcccatttttctagaaaacctaactatacttgctgtacttgtttttgagtttgacgccaattctgatacagaaagcttacttatagcctctgtattattaagtatgtaatcagctatttttttatctacttccgttaaatcttcaaatatctgttttaattttaaaatgcaactcatactctaccacctctacctatttactataatatttcttcttagcaagtaaacatgctcctaaatctggagtcaacactggtctcactataccaaatctcgttttattcaaatattttttaagtggctctaatattaaatctcctgacttaaacactccacctgaataagatacctttatctttgtaccttgttcaaaatgatgctctaatcctattataagcctacttaattcataagctgcatcatcaaatattttactagcagtattatcaccttcaataactgcttttaaacatatcgtagcaaactttgctatttctattctatctccttgtattccatcatttacatattttattatgtcataatcattctctatattaagatgtctttttattaaatcatataattttgtctttgaacaccttccatcagactgcattgtgaacatttttaaggtagccattcctatataatacgctgaaccttcatctcctaatacatagccccatcctccacatctgtgaagattcccatctttatctaaagcctgtgctattgaaccagtacctgcaattatatttatacctttttccccatttaaagaacctgctaatgctatttctacatcattacctagagtataatttatatgactatatgcattttttgttgctacttctaatgcatacaatacttcttttatttttccatatccagcaagtccaacaaatgcatacgttatttcttctacatttatcttagcatctttacaaacttcttccaacccagttattaataatttcgttagattatcaaatcctatttgattataatgacaagttcctttggttatggttcctactatatttaattcttcatctactaatgtaaatgttgttttcgttcctccaccatctacacctaaaaaatacatactatcctcctacaatatctttaataattctttcaatacttaatatctaaaaataaccttccaatgctgtttttttaatattgaaaggttatcagtactattatttattttacaatttttctattgattttaaagcttcacttatataaccttcttgtctatctaggatactctttgcactatccttatctaaaccactttttatcataaatatagccaatttaactctattatctgcttcttctaagaatttttctgcaacgtcatattttacatttgtagctatcattattattctttttgctctttcaaccaacttttcatttgatgtcttaacatctaccatcaagtttgagtatacttttcccatcttaaccatagaagctgttgttaacatattacataccattttttgagctgtaccacttttcattctagttgaacccattattacttctgcccctactataatgtttattggtaaatccgcttttttactcatttcactattcggattcatagttattgatagtactgcacaccccaattccttagcatactccattgcacctataacataaggagtccttcctgatgcagctataccacatataacatccttagatgtaactcctctatctattatatcttgctttccaagttctttatcatcttcagcaccttctattgctttaaatattgcttgatttccaccagctattatagcttgaacaagctcaaaatccactccgtaagttggaggacattctgtggcatctagtattcctatcctcccactggtacctgctcctatatagaataatctacctccctgcttcattctatctactattatattaacagcttttgctatactctccttttgttcttcaacagcataggctacagttttatcttcgttatttattaattctattatgcctaatgtatcttctttatctatttgcaatgtattcttatttctaccttctgtaactaaattttctaaagtttttattaacatatcatttcctcattttcttaatattaaatttttaaacacattttaactccaactttcataattatatttttataataaattaatattttcataataaattattttgttgagggtttaaaatcaaacttttgccatggtttaatataatctaatataaataattcttcttttcttatatatcctactacattcgatttaccactgtttttcatatcagtcaaggctatttgtaactcccctgcataatgaccatattcactactttcaattactatatctcctctttttattattttaggagtattaaatagttcaaatttgtatcctttatatttaacacgagattgagtagaccttatcagactgtcagatatatcccctctattaaaatgtatttcttcaaagagtatcttcttctcaacttctcgtatattttcctctattgctacatcaaatgtaaccatatcttttctcatagaacctaatacctttagctcctcatatgttggataacaatttgatattattatatcatttatattattcatagctattatatgctttacttgaatatctataggtagatttctgtgcatctcaattgttggaagcccatcagttacaggccatggtccaaatgtggtttcattttgacttgttacaaaaactgctgttcttaatccatacttattaaatctttctgtacattttataaagtgttctaaatttaatccactatatctatgtggataaaagttatgacatcctgtcaaattttctttatttggttggtagtccattattgtatctatataattagtattattactcatattgatttctattttaagattttgaggattaaaagtcattaaggccttttcagaacctgtaaatcccatatcaagccttattccgtctgccttcgtctttttaaaaaaagtcaaatctttgtagcttatttctaattcaccaaatactctgggatttacatcaagtattacctcaaaacctttaaacttagcgtattcatttatacttttaaattttttaattatattttctttagtatctttaactgataataaacatgaaaatatacgtgtaaatccattttcagcagctttatctatataatcatatatttccttagatgttgttttttctggataaattgatattcctaatcttcccatctgtgtcatctccttatatcctatatgtgtttaaatttatttcgaattacacgaaacttttttaaaaatttggtgaaaaaaagtttcatatatatttataaaaaaagaaaagtttaccttttctttttttataaacaatcaacaaaatatcttcgttacttatttcataactgttatactttgaaatttatactaatctaatatagtttttaatttccaatatagtttctaattaataagcttcttgctcttcaactttttcttcatgaagcaatctcttatcgtacatcttgacaaatggatagtaaattattattgatatagctatacataataagttaagaactgaagctctccaatctccaccagtggctaaatatgcccctactggtcctggtaatgtccaaggagcagtaactactactctggatactaaattagcactcatagcaaaccatgaaactgttgccattactattggtgccacaacaaatggtattattaatattgggtttaatactattggtgctccaaatattattggttcatttatattgaatattgctggtattacagttgcttttcctaaagactttccataagctgattttgctctaaatgcaagaagtaaagctaagcctattgtagctccagaacctccaatccatataaaccattgaaaaaagggttcagcagcaatacctggaactgcttgacccgcagcatatgaagctgtattagcatctaataattgtatccataaaggtcttgccaatgaacctattattgatacaccatgtattccaaatgaccaaaaaaacgttattaaaaatattagtataattactgatggtaatgtgtcagtggctgaaactaatggagttactaatttagctatgaagccatgccaatcaaaccctaggaaataagtaacaatagccattaaaattattattaatgcggctggtgtcagagcttcaaaagaccttgtgactgatgctggaactgcttctggcatggttatcttgaatttagatttgtcagtaaatctataaatctcaacacctattatagatgttacaatagcaacaaacattgaacctccaccaagattagccattggcatttgccatccttgaggaattgaattataccaagctaaaagttctggactcttttcaactatctttaataaatcaggggtaagaccctctattgcagtaggaactattgtcaaaaggaatgtagctgtagctaataaacctcctgtcaatccatctaacttatatgactttgccaaactataacctatgccaaatgtagaatatactgatataataaaaaatgtcattctatatggtagtaatattgtaactgcattttcctttagatactgagttaccccccatgaatctggtaatggaggaaatgctaatatcaagaaaaatgacccaactattataagtggtaatgaagctacgattccatctcttacagctcttaagtgacgttgttctgccaatctggccatagaagttgataatttactgtctaaaaattctgtaaatttatctagcatcttttctctccttaattaatatttatttttattatcattaaaatttttataaaattaactttcttctaacctaacaacactgcaactactatttactcaacaactcttgaacttgttttaataactttggtcctcctaatggactataagcttgtgcttgtattaatgcacatggtacactagcctcatcagcaaaagcttttaaatagtcaaatctatgtctgacttgtggagctaccatagcaatatcccatccatttttaacttcattctcaaactcttgagtaccaacagccaaaacatctatatctattccattttttgctccttctttttgtaatgcattaactgctatagcacttgacatccctgatgaacaaacaaataatactctcatattgattccccctgtttttttatttcttttcaatcattatagcatgtatttttgattacaggaatacgtttgtatatattttttcatattttacatttttaattgtaattttatttcatgcatttatatcttgctttaattgctttatttatctaatcattcttttgtctaaaattacacactacttaaaatactcatatcttttcttaaaaaagaaaaaagactatcttttattaacataaaatagtctcaatacttttttaaatatgtattcctttatatatccagaagtaacctattattgcaaatgataaaacaaataaaatatacagtctaaaaaatcccaaagaaaaacctctcttagtttcaacaaagtatcttgtatatgcaactgcaaaagatgtaattaatgaatttcctataacaactccaaatctattatctattccaaatatagataataacaaaggaaaaactacagtacttactagagatgaaactattagtattaatccacttttaaaacttatagttggaatattataatctgttctttgatttttctccatttctttcttagtatttttattactttttgcatttttataattattatttttctttcttttcttttttttattattagacatgtcatttacctccaaaaggtttaggtgttatattccctaaaataactttatttttagcccctgttgcagatattacattagaaaaagaattatttaatgtttcattgcccaagattacaaatgccaaagcctcctttgcatcagaagaatacccatattcatcttgagttaatacttcaacctctaataataactcttttatatatcctattaaagttagattatgaactcctccacctccaattaataaagtatctacattaacctttggaagtatgaagtttttataattataatatatagcttttgccgtaaacatagttactgttgctatcaaatcatatttatctacatgtttatatttgttaagcatgttatccaaatagacttgtccaaatacctctcttccagtgcttttaggtggcgcttgactaagatacttatgactcatcaaatcttttaacatttcttcattaattttaccttttgatgcaaagtatccatttttatcatactttctattaaataatctttgacatactccatctattatcatatttcctggtcctgtatcaaatgcaaatacatcatctatgttacatgatttaggtattatagtaatatttcctattccaccaatattttgaagtgctaaatttttatttttatcactatataataaaaattcactatatggtactaatggagcaccttctccacctgctgctatatccattactctaaaattagatattacctttgtatttgtttcatatgctataattgctggttcacctatttgaagcgttgaagatacaaaattattataacttcttggtatatgaaagattgtttgaccatgagatgcgataaaatccaaatttgctatatgaaagtttgctttatgacacactgattttacagctttactaaataaatatccaagcttaaaatttaagctacagattaaatcaacactcgattcctcttctatacagcactttcttatttcgtcttttatatctttaggaatttctagagttataaattctatttgcttaactttagtatttctaccattcccactaatttcagctagtactgcatcaactccatctaaggaagttcctgacattaaacctacactatacatagttatcatccttttaagtttatagttattcctccccaaatcaaggtattaagtttaataattttagaattaatcttatttcatctttaattgcgataatttactcttacgaaattaatcgagttaatcttatacacgttttttaccttagctaaatcttacattaatttattttcagtgtcaatgtaatgcatgtaattttttttcacaaacaaaacatattctctctccaaaaaccatattaaaatagttactacaaataaaaaacataccaggtacctatctgatatgtttttcatatataataattattattttataatatagatagaacatcatttaaggcactaattaaatcttcactattttcaagaactaaatttattcttattgtatatgtcgatttgtatatgatgatagattttatagtctaataacctaactatctaggcttaaataatccgatatatcataaaagtagatattaaaaattgtatatgaaccaattttcgaacatacctcaatctcatgccctaaactatctatcattttctttacaaaatacatccccattccagtagacttatacaattgatttcttccatttttccccgtaaatcccttgtcaaaaaccctagatatatcttcctcatttatacctataccaaaatcttttatagataataccactccattttctaacttttttgaattaaattcaatcttaccaacttcctttgaatactttatagcattattaataatttggtctaaaacatatgacatgcatttagaatctgtgtaaacatcattttctaattcattcaaactaacttctacattattttttataagcaaaaatgaattattttttatagacatttttaccaatttttctaaattaaatttatttataaatacatcttcaaacatagtgttgcttctactactatacaaaatagagtttactaaaaaatttatctttgcaacctgattcttaatatccaaactatcttctatgctacttaacctatctgtaattatacttaaagaagatattggaatttttatttcatgaacccatttagctatgtaatcatctaattcttttaatgattgtttataagtctctatgtcactattattttttatttttaagttttctataatatcttttattagattttcttcaaaagattgtccatcaattaaataactgtctatttcaccactattttctatacaattatataaatttatataactatttctaaaatttatataatctataacaaaaaataccattattataaacagcactaaaaaatctaagtatattaattctgaatatctattttttaaaatatctatagcaaataaatagatatttattatactaactacaactaaaggtagagcaatatacttagacctaccttttaaatattttactagcattatattatatatcctatccccttcttagtttttataaaatcatcaaaacctagttctttaactttacttctcaatctattcatatttacagtaagtgcattgtctgtcacaaactcatcattatcccatagagtcatcataagactttcccttgatacaaccctattcttattttttaataataatgttaaaatttttatttcgtttttagtcaactctatacttttatccttatacttatgttttataatccctttccccacatcaaacatcaaatcttcacaatacaaaatactattagaatcactataattatagactcttcttattataccatttattttggtaaccaatatgtctatagaaaatggtttggtaatataatcatctgctccattatttatacccattattaaatccatatcagaatctcttgatgataaaaatattaatggtacatttgaaatagctcttattttttcgcaccagtaaaatccattatataatggtaaatttacatctaaaagtactacatctggttttttatccataaattcatctaatactacctcaaaatcatcaattaattctactttaaatccccatttttcaagtgctaacgcaatctcttttgataaatcaatatcgtcctctactaataaaattctatacatttgtatattctccattatcctaatatttcactatgccatgaattattaatatcataacatattttatataaatttattacccaaattatttagttaatcaacaaggagactcttattacaagaatctcctttctctttattaatatatcaactaatttttatacactacactcttaaacttattaacagatactgctccatatattacgaatattatcaaacatatcactaaacttagtatatatataccagataaatcgttcatcaataaatctcctgctaatctcaatgcaaaataactagatatagttgcacttaacattggcaaagtataaaatatagctacttctttaagtatagctctatttatatctttttctgtagtacctatttttaataaaatcttgtatttctctttatcttcatatgcatcactatatattttcatatatattatacttccagctacaattgcaaagactaagaataaaaacacaagcactacatatgcaaacttcatccattgactctcaccttgagctttatatccattctgaatatatccattttttaaacttaaattcttttcaatattgttgaacattacttggctattttcttcttgaaatacctttgcaccataaaaatatacttgttgacccttatctcttagtttaaaatatgtatcatcatttaccactataatactttgattaagtcctgtccctaatactggaacttttacttctccccttgaaatattatataactgaccatcaagttttgtcttgacttcttttgtagctattgatgctatcgtttgaggactttttagctctattacattatttccactaactaatctttcaccatactcttttaattctttatcattgccattcactttaagagtattacaaaaatcactatatttcattatagtatctgttgtatcataagcttcttttatatctgttttctttaagattgttagttctggatttacggagtactttatcttattagtatcttttattatgttctctatttgttttttattcacttcatctttatccattgaaactatgctaatagtgtacacatttctttgttcttgggcattcttatgtatatgcttcatagcaactgaagcaccaagagttgatattgttgtagttataattatagctattatagcataagttttatagtttttatttaatcggtagtttatattgtttatcgcaattatattatttccattaaataatatttttttatttttgattataatatcaaatataacaggcataactgatttgaataagccataagtacctactattattatacctataacaggtagtacactagttatatctccagttcttatattcgtagaaagatagtatccatatcctattactataagtgatactatagctaatatatatatacctattcctacctttggtattttttcttgttttttagatatattgattagatttattacactacttctacatattgttataaaaccttttacagccattattataaatatagaaataaagattaaagtagcatatagtatagcttctatgctaagtccattagatacctttatattaaatccagataattttattatcactacttgaaaaaatctagatgttattatccctataattattcctgttatacaagaacttattcctataagcatattttctacaaaatatatttttcctatagtatataaatctaatcccataaaggacaatattccaatttctttagacctattcttaaaaaatatatttgttgcataccatataaagaaaaataaaaatactgatagtatcattattacagctactaacactgatagtgtaaattttttattttcctcttgtaacacatttatagcatctccatatcttaataattcaaaattagtcagcacaactactgaaaaaaccatagatataaaaaatgctagataagttcttatgttactcttaaaattattataagcaattccaagtatactcacttacatctcacctcccatagaggctagcatatccataatttttccataaaattcttttctactatttcctttgtttaatttacactttatatttccatcatttatcatatatacttcatttgaataacttgccgttagagggtcatgtgtaatcattataatagtagcgttgttttctctgtttattttttctaatgattctaaaagttcatatgctgatttagagtccaaagcacctgttggttcatcagcaaatatgactgctggatttgtaattaatgacctagctgctgcgcctctttgtttttgtcctcctgataactgatatggatatttatctaaatgattttctaatccaaattttttagctatagaaaataccttagcttctatctccttgcttttcttttttcctaatgctagaggaagtgctatattgtccattagtttcatattgtctaatagattatagtcttgaaatataaaccctattttttctcttcttaattttgatagttcattattttttacttttgatatattaattccatctagtattatttctcctgaagtttgtttgtcaagtgtagacattaaatttagcaatgttgtctttcctgcaccagatggacccattattgctataaaatcaccttcattgactgtaagagatatattttttaacacatttgttttaaatccttttattccataatcttttgatatattttttatttttaatatttctttcataataatagcctccagttgctaattttttaatatatatttattttaaaggttttatataaataaatccttaagtaaatattacattttaactgttagcattacacttttgtaacatatggaagactattataattatagtggaaatatcttaaaataaaagcatgattcacttttttgtataaacaaagaaaagaagcccctaagaagcctctaatctatacaataattcttctctataaaaaaccaaaaatacaaccttgattgtggcaaatacaggtactataaacaagtgatattactactatatattaaaacaattattcttgaagataattcaataagactatcaagccataagctaagcatccaaaaagacttaatatcattaatgtataattatacccaatattaatactcaaaaaaccagcaacagttggaataatcagagatgaacctcccataaatatacttaaagctattaattggctactacttctaagttttttaggagaaacttcaaatattaatctttttgaagtaattaaaattaaaggagtagaaaacacttgaaaaacacacagtataataatgatatttgaatcatttgttaaagcaaataatagaaactgaactgttatcataatagcacttaattttaataagtttaaactgctatatttttttaataaataagaaccagccagatatgttggtatctctaataatgactgtaaagaccactttaaagatatctgagaatttgtagcatttaaagctatcattttatctattacagtacagttatttgctaccaccattgagtataataagaataaaatacatactagtaagatatattttttatcttttaataattcaataatatctttattagttacatttattttcttattaatcttttcaatatcaggtaataatagtatatttataataagtaatactacaattaaaccaatcgctacagataatccaaaatatgagaatctaagaatcaagtaagatgctaccatacttccaatagcccatccaatcgacccaaaagtcttaataaatgacaaataattattaatattatctccacaacctattatccatgtatcatataaactacagcaagtatttaataatcctcctgataaagcaacaagtaataagtatattataaaagttgcagattcagtagaaaacataataactgatgcaattccataaactgataaactaattaaaacaatttttttcattgtttgatacttatcagctaatactccaaataataattgaaataatatattggttattgcatagctcgataatataattcctctttcaaacgctgagtaacctaattttgataagaaaggtgtgaattttgttgaagcaaaggcaaaaataatatatgagaaaaaatagaatatgataaatttaaatttaatcgctttattaatcataatcaatcaaaattgataactttaataccactatttccttcctgatttaagtttgaaagatgatattttaccgtattaggattctctacaataactaaaggaatatataaagtattttcaagtaacttattatcaatttctactaacttttcccccatattaacttcttgaccttgtttaacttctaatttaaagttttctttttttgttgttgcactatccaatccaatatgaataagaatttgaacatcattttgcaatttaattcctatagcatggttagtttgagcaataaaacttattactcctttagtcggtgatttaagaatattgtcctttgctatcatagcaaatccatctcccattaccttagttgaaaatactttatcaggaatttctccaagattaattatttttccatcaatgtatgaattaattgtacttgcttctttttttcttttaaagaacattatagacactcctctacataattaactttattctaattatcattacaaataacgatattaagcatactgcaattgaggaaaaaagagccttatagctctttccccattgtagttctttaatactgcttatgatttgtttaattccaacaaatttataaatataggtaaacatgataacaatagttattgtgtaaatttggaatatctgccctaataagactaaatagaaagcaatcatgttttcttttatctctttattcttttttatattgtaaataacatatgcactgtatactgcactaaagttagagattaaatttaaacttgcattaacatcattgtttaaaagttgtgaaaatgaaatgtttgtaaataatgatgtcaattctaaatacactatatataaaacaggtaatattagaaaacaaaccataaccactgaaagaaatatattttcatcttttaatactgctgttatattttttattttatttgttatcatgtttttgttctccttatttaaaagttggccagaaatccttattagccacaatcatttcatctaagatttcttttgctacttttgcacttggaacagttttactcatagtaaacgactgccataatttttgataacttttttctatccatgcttctacagctaatttttcagaagcaacttgttgttccattaaacctttttggaaagttggaattttacctatagacataggttcaaccatatcttttccaacaaggcaaggaatttcaatcattgcatcatctgcaaaattttcaatagctccattattaggaacaatcagtaaaaatctttcctgagtattaaatgctaatgcacaagctaattcaacaataaattgagaatgttcacttgcatcaaaccatgtatcccttgctgtgccattttttataattctttcacattcttcgaatgtatccttttctcttctatccataatttcatttgctcttgtataatttggattagcatgttcaacagtttcatcagccattaaataatattttaaataagtattaggtaatgtagtcggttctatttctaataagtcctttgctgctctcatagtttctaaccaactagattctttgtgttgaccttgaggtgtaaattcctcatatccttttttagcacaatattcctgtaatttaggcattaaatcatttccttctttgtccttaatacttgtccaccacccgaaatgattcaatccataatatctaacatcaaagtctttacgagaatttaaacctaaaattctagcaaatatttcctctaaacatactggcatatcacaaatattaataattcttgaatttggtcttaatacacgacatgcttctgcaactatagctgctggatttgaataattaagcatccaagcatttggagaatatttttccatataatcaatcatttcgattattggacctattgttcttaatccataggcaattccacctgccccacaagtttcttgaccaacaaccccatattttaatggaattttttcatcttgttcacgtaaagcatataaaccaacacgaatttgtgccattacaaaatcaatatcagtaaatgcttcttctggatttgttgtataactaaatttaatttctggatttttctctctaacaattattgcacatgcttcagcaacttttctttgtctctcatcattattatcatataatttaattgattcaataggaaatttagcaacactttcaattaacattgttacaattccagcagtataagtactacccccaccagcaattagtatcctctgtctttttctttccatctttccttctcctttataataaattttcaaattcttctcttacacttggtactgaaagcccaataataatctgaatagcttttccattatgcactaaaccatgtgcacctactaccttaaaatcttcttctttagaaataattgagtcatccttcaaggttaatctcaacctcgtagcacagtttgtaacatctacaacattttctgctccaccaactaattttatgtattcagatgcttgttgagaggctttactcaatttatttcctttttcatctttagtttctaagtattcatttttagtatatagttttgtttcttcattatcttcctctctaccaggagttttcatatcaaacttcttaattaagaaagtaaataaaaagaaccagataaatgaaaatataatccctacaacaacttgaacaacatataccttccagtgatacattccaagaggaagccaatttaatacaacccagttaataattcctccaccaaaatcaccaacaactcctaaggcaaacgaaatcgtttgcaagcatgcatctaaaaatgcatgtactaggaataaaagtggtgctacaaataaaaatgtaaattctaacggctcagtaattccagttaatactgcagtaagagtagcaggaatcattaaacctaatacttttttctttttttctggctttgcagttacatagaaagcaccaaatacacctaatgaaccaaacaccttcgataatccagataatgaaaatccgattggatacatttcctttagagtcttagctgaagtttgaaagtcctgaatatgagtagcccaatatactgatgtaccacctggaacaacaacactatcataacaaattggtgcatatacaaaatgatgtaatccagttggtattaaaatcttttgtaagaatgcataacaccaaactcctatatttccactatttataaaaaacgtttgcaaatgtctaataacattttgaatatgaggccaaataaaacaagttaataatgcaactggtatcataacaaagaaacaaattgcaactacaagtgatgagcctctaaataatccaataaaatctggtagttctttatcataaaatctattatgaatataaatgacaatacctgatattaacaaagcaccaaccataccagtatctaatgttttaataccagcaatgcttacaagtccacttccagcacttatttcagctgcgaaatcaactccaaagctttttccccaaaaacttaacatagaacctacaaaataattaaaagtcaaatacgttgctaaagcctccatacaagctcttgcttgttgcttttttgcaagtgctattggtaaagaaatagcaaataataatggtaattgattaaataccatccaagctccactagatattacaccccaaaattggtaccaaatattttctggtgtagcaagtgaacccataattgactgattttgaaatacaattgagaatccaaccattatcccggcaaaagcaaataatagtgttggtgtaaacattgcccctccaaaacgctgtattttcttcatcatataaattactcccctcctcatatttttagtttatctttggccttagatatctattattttaacaggttaataaatatatacaatctttagggtacatttggagcttattcacagtcaaataagtttttgcacatttttatgttcaaattctcataaaaaaaagaatgactacaatttgcaatcaatcccttctgtaatcattctatgccttttataaatactatatttaataaataataactcaatcaatataaaatataacattgtcaatttataactagggtgcatttgtaaaaatgagatattagtcgctgaaatataaattgattcatcacttaaatcagtcaatgtattatttttaaactctgtaattgaaattattttagttcctattaattttaatcttctagcaatattaagtgtattctcattctcaccacttagggatataataatcataacatcatttttactgacaatattgtaaaaagaatcatcaaatgttcttccctcaaaatcatatattatttcttgacatgataagaacattctctttatctgttttgcaaccacattttgaatatcacctgaaccataagcgtatattgttcttgattcataaagaagtttacacaatgcatcataatctttatttttttgatcttcaacatacttaattattgaattacatgcaatatcaaatgactgattttctatgacatgaaccttttctgattcccagcttaataatactttaaactcactgaaaccttttaaatctaattttttaacaaatcttgtaatagttgcacgagacacattacatttcatagcaagttcatttattgacatcttactacaatgttttttatttgcagttatatatttccatattaataaatctgtatcattcaatttattataatttaaaaaaatcatttcttctaatctcataaactattatcccctttaattaaaaatcgtcataaatattataccaatattcaacattaaattacagcgtattcttatatttactatttagcccataaaattgactataaaaaatactgctataattgatgtttaaaaaaatgtagttttaattttattcttttatctaataattaatattttcaagttctagtgcttttcttatgcaattatcatctttaaaatcagcagtccttttacaatcttttactttaaattctggaatagttttaaattcctcatcacatattccattcttatttaaatacatacaacttgccattctaactattagaccactattttttaaattaaacaatacagggtctatacaccctccatctccgccagtagtttcaccaactaaagtcgcaaatttagtttctttacaaaacattgcaaatgactctgatgatgaatatatttttctatcaacaagtaagtatatattacccttaaattttgaatcatctgtagattttatagtataggaagtatcttcaaaatcattaaaatcttttataatttctttaggtgcattttcctttacacttgctggtaaattttctacaggatttaattttatatttcttgcatttgtatatttttttactatttcattattatttctataaattctataaccatttattttgacatcattttttatgagtttagatacgattccctgccaatacctatcacttccacctaaattacctcttatatcaataattaaagctttatgtttttctaaagtgttaatataatctccaattatttttaaatcattatttatagagccattctttgatgacattgatggtaaatacatatatccaatctgacccttaataacatcctttaaaattaattctttttttacaaaaatatcatctggcatttttattttaagattcatagagtcatatctatccacaacttttttatcattaagaaaatcataccaatcattattagagtatgatttcttaaaaagttcatatcttttcttattatctattacttctgtgtgtttattatttaaatcagataatatagatgacagttcttctataaattcttcatcattttcagtgttttttattcgttttgtatattcatccttatttgctaaccaatcaatattattaagtctcttatttacacctagatatggatatcctgtctttacaacattatacacataattaaagtcatccaccttttcctcttcagacaactgattcttttgagaataagtagaattacctaataagattataaatgctaaaataattactaaaaataatactttctttttcatgtaattctcatccactttcagattttatattttaatacattgtatcattattttattatcacctaaacagttaaaagaaattcttgaagatatattccactattattctatttaaaaatttttatttgtattttcaaaattatttcatgaaagttataaaataacaattatattcaaatatctattttactgctatatcctgaaagtaaattcttatcagtgatatactaaaaaagatatgctaaaaaatttatccattataatgacttaaatttagatactttactgatttttatttattagttgagaaaggtattgataattaaaaatattgataactatagaaatgattattttttatagaaattttaaggatataaactaattatacttaagtctatatccttaatttatcatgattatgagaatttttacaaatacttatctttgtccgttttagaataaaaacaagaacatatcctgttattttattcaaacatccaagtttaattactacacaattacttattagaaattgtatctacttcatatatatatctgttaagtatagcttctagcatttcttgtcttccagacttattctttataactggcatttgcagtgcataagattctaactctttaaatccaaccttaccttctactatatccttacctataccttcactaaaacttgcatatctttctttagtaaagttttcaaatacctcatcttctaataatttatgagctattaataatccctttgcaaatgtatccattcctgcaatataagctaggaataagtcttctacctcaaaagatgctcttcttactttagagtcaaagttaaatcctcctggtgctattccaccttgctttaacacttcatacatagcaagtgttgcatcatatatatttgttggaaattggtctgtatcccaacctaataataggtctccttgatttgcatctatactacctaaaacattgtttattcttgctatatttaattcatgttggaaagtatgtcctgcaagtgttgcatggtttgcttctatattcattttgaagtatttatccagattatactttcttaaaaatcctaaaacagtagcagtatcaaaatcgtattgatgtttagtaggctcttttggcttaggctctattaagaattggccagtgaatcctatttccttagcataatctacagccatttgtaagaatcttgcaaagttatccatttcaagttctgtattagtgttaagtaaagtttcataaccttctcttccaccccagaatacaaaattttctcctcctaagtacttagttatttccatagcttttttaacctgagctgctgcatatgcatatacatctgcattacatgttgtagatgcaccatgaacaaatcttggatttccaaacatattggcagttccccataataactttatacctgtcttttccatattaacttttatatactcaactatttcatctaatatcttatttgtctcttctaaatctcttccttctggagctatatctctgtcatgaaaacagaaatactcaattcccatcttagacataaattcaaatcctgcatcaactttaatctttgctatctcaattgggtctgttacattattccaaggtctctctactgtgcctactccaaatgggtcattaccctctccacataaagtatgccaatagctcattgcaaatcttaagtgttctttcatagtcttattacctaccacttgttcaggattgtagtatctaaatgctaattcattgtcagattttactccttcaaattttatctgtcctattcctttaaatatttcactcatttcatgtcctcctaatattttacacatataatatatgtcgtatgttttcttaatttaaaactattttctatctttatttttctttttaagctaatttaattatttatttttgtattaactacttcatctaataacttaaagtcatctttcaaagatttgtatattcttttatacaatctatgatatatcttgtatgtatctacattttcacttattggttctaatttagttgaagtttttattatagcatcacaagctttttgtatattttcatatattccagctcctactaatgcaagaattgcaactccaagtgctggtccttcacttgaatttatagtatatacatcttgattaaacatatctgcttgcatctgtctccatactttactttttccacctccacctgaggctcttacttcattaacgtctatattaagattctctattatatccatacagtctttaagactatatgaaacaccttccattattgaccttgcgatttcttttttagaatggattggagataatccaaagaacacacctcttgcataagggtcaagatgaggagttctttctcccatcatatatggtaagtaaagcaatccattacatcctgttggtacttgacttacttgattatttataatctcatatacatcttcacctaaagaatttgaaacttccacttcactttgacagaaattatctttaaaccattttaatgacaatccagctccttgagtaactcccataacatgccatgtatttggtattgcatgacagaaagtatgaactctaccttctttatcaatttttggctctttcgtataagcaaatactacacctgatgtacctatagtagatgaaactactccatctttaactattccatttcctatagctcctgctgcttggtctccagctcctcctaccactattgttccttctttaagccctgtcaaacttgctacatctctagtcacataacctgtaatctcttgtgattcataaactttacctaaaagatttttatctatatttaacttttctagtacttcatcgctccaatctctttttcttatatcgagcaactgcataccacttgcatctgatacctctgtagcatattcacctgtcaatttgtatcttatataatcttttggaagaagtattttattagtatttatatatatatctggttcattgtttctaacccataatatctttgatgctgtaaatcctgtaagcgctggattagcagttatttcaatcagtctttcttcacctactaaatcagttatctcctcacactcttttactgttcgttggtcacaccatattatagagtttctcaatgttttaccttcattgtccagcataactagaccatgcatctgccctgataatccaattccttttatacattcactgcttatatttgaactttgaactacttctcttatagattcgactacagctttccaccaatcatttgcatcctgctctgcccaacctgatttctcttgtataagaggatattcatatgtacaactttttataatatttcctagtttatcaaataaaactgttttagtacctgatgtaccaatatccacacctaatacatactccaacttcatccctccttgaatgccacttcataactatcgttttcctatcctaatttttttatattttaggtatattttacttgctttatttttgttagtatattaaactaacttatgaactaataataaaatatttaattatctttgtcaatgcaaaataaccttttatttttgtgtaaaaagtattacaatattattttaaggaggaatatcaaattggttactgataaatacactattcgagaaatgaatgaaagattggtacttgaacaaattataaaaaatggtcctatttctagggcaagtatagcttctactataggattgaataaagcaactatatccgctattaccaaaaaacttattgatgaatctctagttcatgaaataggaattggaaatagtactcatagtggcggaagaaaacccatattattagtatttaataaatgtgcagggatttctttaagtatggacattggatacgactatatattttcttctctatcttacttagatggaactattataaattctaagaaattaacagatatacaagtaagtaaagacaatgttatacaattgatagatgaaattataaatagttataacatatccaaaatagacactccttataaggtaattggtcttactttggctatacatgggattacttgtgaaaataaagtattgtttactccatattataatcttaatgagattgacttatatagcatccttagcaaaaagtatgactttcctattcatatagaaaatgaagcaaacttaacagctttagctgagaatactttttcaactgtacataactcactacttagtctcagtattcacagtggatttggttcaggcattataataaataataaattatatagcggcagaaatggtatgagtggagaaattggtcacactatcatcatgcctaatggtaaactatgtccttgtggaaatcgtggctgtttagaacagtattgttcagaaaaaaaggtatttgaacagctttcttctttagaaaatattcctaaaatagattctgatatagtaaagcaactatattatgaagataaccagaatgccaaaaaagttattcatgagttttgtagttacttaacaatagctataaataatgctattacaacttatgctcctgaaataatatatttaaatagccaaataattagtgatatccctgagatattacagattacaaaagatatgttagttagctcttttaacaaaggaataaatatagaaatttcatcattagggtctgaggcatctctatatggtggctctgccgtaaatatcaagagctttttgaatatacaaaatttaactttaattaatgaaatataagggttatgactatatacagccataaccctttaaattatacattctaaaattagatttattatatagtttatgcaagattagctatattttttaaaaattgtatatcaattaagtattaacacaagtattttgttttaaatattaatataatcttcctactcatcatcagataataaacttgcattttgttcaaccatagaaatattatctttacctattttctctaattttgctgccaattcctttgtatctaaaaaagctgattcaataaccatacctaaatttagccctgaaataattttaattcgactgtcatcattggctactaataaagcagcattgcatggagttccacctagtaaatctgccattataattatttctgaactttccttgtacacttctaaagctttttttaatttttctattgttccttctattccatcatcttgtttcatatttacagtaggataatctatagaatcccctattatcatttttgcagaatttaagacttcttcagccatattgccatgactcatcaaaataatactattcactttaatacacctctttaaatctataagatgtctacaagataagttttcttatcatcaggcgtcattatagttgtaatttcaattccttcatctaaaagtcttttaaatgcttctttctcttcttcagtaacactgatattaggtcttagaactgttgtatcttttctacttgacatatttcctacatttatattatgtattttaaatcctgcctctacaaatggaataaggtccacaggagacttaacaattaataatacattttgtccttcatactttcctgcagtaatattttttatagcagtctcttctgtaattatagatgacgctatacctgcaggtgtagccattcttaaaacttgtttttgaacagaattgttagctactgcatcatttactaccattaatcttgtaacacccaatttattactccacatagttgcaacttgaccatggattaaacggtcatctatacgaatatttttaatacctttcatttccatatctaatatcatcctttccttattttaaaatacctaatgcatataaaattattgaaacaaccattactcctaaaattaagtatataggttttatattctttttaagagcccaataaacaatcacaactaaaattgcaggaactaacccaggcataatttggtctaatatttcttgacctttcattgtaaaatcaccttgttgaaagttcaaagcaacattagcttttacaactgaaggtattaatgcacctacaaccattaaacctaaaatagatgtactctcagttaaaatctttaaacttttttcaattgaagatattagcttagtacctgatgtatagccagcattaaatagtggtatacttaataatttcaatgctacactcactacaatccacagtaagattccaaatggacttccatctatcgccatattagctgctatagctccaaaaattgtccacggaataacgacaaataaactatctcctaaacctgctactggtcccatcaagcctgttttaattgaagcaacagcctcttcagtctcttcacttgataactcctccattgctacattaatacccaaaatataaggggcaacccaaggattagtgttaaaaaattgtaaatgatttaatacagcactttgtaacttttctggattatctttgtatactacttttaaaaaaggtagtactgcataacagtatgccaaggcctgcatcttctcataatttgaagaaacagaactagtaaaaaaccagcgccataagacactttttttcaccttttcatttgatttatttaatgataccttatcactcatcttcgtccatacctcctactacagtatattgttgttcttgattttccaaattctttttgtaaattataagtgcaattgctccaccaattaaagctacacctaataatggtactttcatatatactgctaaaacaaaaccaattactaagtaactaaaatactccttagcaggaagatatctaagtaataatcctatccctactgctggaagtagtcctccagctactgttaaaccacctgttaaccattcaggtgtatatttcaaaatggtattaattaaagaaggtccaaatattacagatagagcaactggaatacctgttgtagctgctgttaatagtactcctaacatttgcatataggttatatttttataatttccttttttagctccatcttctgctttatgaactagccatataccaatagtatttctaagaacatctaattgtaccatcaataaagcaactggaatacctatagagattcctacagatgcttcttgcttagtcgtaatagttataaatgtggctactatacttgctgtttgataatcaggtattgatgctccaccaaagttactaatacctaatgataatagctgtaatgtacctccaatatataaccctgtatttatatctcctaagataagaccagtaataaaacctgctgttactggttgatatgttccaaacattgttgaatttttttcatagtttataaaaaatccatatagtacgattaataataattgccataattgtggctccattatgatttcacctctcccaaaatattttttagttctttaaaattataactggaatcttgctttaggaaaataggaatttcttccagcgggcattcaacttcataagttttcccaccttcataactaactccactaaatatattttcccatgtatgtccttttggtaaatatacttttctacttctatctttataattcattattggagctaccaaaatttcatctccaagcatatatgtattatccacctcccaagttttatcatcttcaggaaattcataaaataaagttctcataactggtgttccatcttcatgcgcttctttcatcagtttttttaaataagtttttaagctctctctaatttttatgaattttgtaagaattacttcaacttcttcaccataagaccatatttcattaggagctccagttaccattgagcctccacctttatttgataatggtttactatgaggcaatctatctccatgcattctcaaaattggtgaaaaagtagcatattggaaccatcttaccataagttctctaaattctgggtctttaggatttcctccatggaaacctccaatatcagtagtccaccatggtatacctgccagtcccatatttaaccctgtatttacttgattattaaaagcctcaaaactagaatcaatgtcaccagaccatactaaagctccatacttttgagctcctgcccaagctcctcttacaagagttacaacagactctatgtcattatgtaaaccatcataaatcatttttaaataatcaataggataaatattaccacaacttaaaacatttccttttttatatctatagttatcaaaatcatacacagaatagccaggttcagctacatctaaccaataatagtcaatcccaagttgtttataatttttatctattctatcccaaacatattctcttgcattttcatttgtcatatctacaaagactgtatttccttgaatttgcattgtcattctaacaccacgattaacattgactaaatagccattttctaaataatcattgtagttttctgcatcactttgaactgtaggccatacagatactattggttctactgaatactcttctttcaattttttaactaattctttaggatttttccaataatctaagtcaaatttatattcaccttgcttaggccaatgaaaatagtcaattgcaattgatgaaagcttaattcctcttttagaatattccttcacaacatctaaaacttcttctgaagttctatatcttagtttactttgccatagtcctaaaaggttttcaggcatcataggaacagttccagtaacttgagaataatttttatttaactcttttgggctttctccacaagtaatccaataatctataaaatttgtagaaaacatcttccattctgtcatatttttagcaaaagatacttttccaattcccggattattccataaaagtccataacctagactagaaatataaaaaggaactgatatttgagaatttctttgggctaactccaaaacagtattctttaaatctaaaaatttatgttgatattgtcccattccaaaaatcttttcagaaggctcagattcaaatctagtagttacttcaaattctccactatagcttggtcgatattctcttgattttaactttagagtagagttaaagtctttggtaatctcaattgtccctacatcttctccaccatcatcatgttttacagctcttaatcgaatatattctttcaataatatttcatttttatcattataaaaagtaattctatctctatggtctaagacagcttttatctttccatttttaatgattgcacttccatcttcatttttattaattgtaatatcatctttatttaacttaggtttttcgttaagagcatagttttcatcaacaaaattttggtctacaaacgacctaatacgtaaagagttttttccccatgcttctattcgcaatagttcattgtcaaatcttttttcaatatagtcttcagatatttttatcacggctacctcctaaatcaatggtataatattctatctttgtgtagcttaagttaaataatgtcgtttagtatcgttatttataaattaggttttatatataattcatttgtacattaaactaacttaccaataatatactttatttgactttgtttgtcaatcgctttccggattttagtaaaattttctaatatgttgcttgaaagtcgttcttaatatcttttatttatacttttaatatctgtgatgatacctatatacatctagttttttttaaacacatacaggaataaaatttgcctattatgtagataatattggacttgaaaatatgtatagtgaccttataaatacagataataatatattagatattgttcaaaacaatggattttataattataaataatttatgaaattatttaagaaaatatataattgtataccaagtcaaaaacgacaacaaataaataaaactaaaaaagatgttgtctcaaaatatagataaatttatttttcattgctaaaatgattaaaatatatttgatttaatatacttgatttaatataaaaaaagagtgtctcataaactaaaaagttcacttttagacactcctttatatatattatcaattcatttattacctctctacattttctttcagctagtagatacatctttataagtactaattactccacttaaaaatgattcaggtactgtccatcagtcatatttttctgccaaatataatggtgtttcataatgagacaataaatatttatatctttacttatcttctctaagctcgtcaaatccaactataggtatctctaaattatattctttaagtagcttttctagctcttctataaaaatacctttcccatccaccatttgtatatcatttattttatccatcaattcattgcaaccacttagctcaccaaaccaacgtttagaactacatgtcttattataaccacaacttggactaccatctattgcaatgatactttttatatcataatcattttttaaatattcattaaactgccttacatgaggtattaacatttgcctacattgttctctaaaaaacaaattgtcaaactgttcttttacatgtccccacctatttattccatacataatcatttctgggcatggtagttgaattattccataccctttatttattaaatttatcgctatattttgtgctcccttaaattctgacaatccctctactttagaattacaatttaatatacaatgacatactactacaatctctctatttctcttcataataatctccttagttattcttaattttaatgatactacatattttgataattatattatttatttgttctatatttccaatattctatatagaaatatacaattagtaatcttttataatctatactatgataaatgtatatatttttttaggaggtattataattggatactaaaaaagtcacattttcttcaatatgcatagttattaatattgtcttaggtatggttatatctatgataaatataccattattatttttagatacagttggtactgtacttggggctgtcgtattaggtcctttttggggtgctcttattggtgggtgtacaaacttagttttaggtgttatatcaggtcctacaaatataccttttgctcttgtaaatattgttcttggtcttattgttggatatatttctaagaaaaaaggttttggttataaagaagctattattacaggagtaattttatctattgtttgtcctttaattggtactcctatttcagttttattgtttggtggtttaagtggaagtggtgctgatttattggttggttttttagttcagtctggtcagaagatatttactgctgcgttctttccaaggattcttagtaatatagtagacaaacctttgtcttgtattatggtggtatattttataagtaaaatgcctaaaggttttataaaacaatatagtaaaaatacttctagttcatattaataaatcatttattatgtaagatttattactctttaaaatgctatatactcatttttatataacatttttattaataatttaattagatagtatttgtattattttaattaaacgtaacctcttgatataaatttgagctataaatctatatcaagaggtgctattttatttttaatataattaatattctattacgcaaaaaatgcatatatttcattattttatggaaaatattacttcatttaactctatatcaaactcattaagtaaaaatctaattatatttaatttagcctctgtatttaaatttgtttctaaatatatattttctgatattttaataccttttcttaatttatatacatctctagacttaatattatctataaaatctcttttataagtcttgtctacaatactgttaaaccttacagaatccaaatcatataaagtaagagcaacttgttcataaaattctgtccaatttttagccttatatgactctcctaatatactaaatgatactatactttcatttgtaaaattaacatcatcatcctctaacgtaaatatattttcactgttacttggaggttcatatgtaacacttggatatttccaaatttctacagctctatctagtaatatcttagttctattttttatttcttcttcattccatttatctatagatgaaatatatttatttagataaagcctactatctttaaatccatcttccatttctttcttttcttcaaatgttttattacttagttttgaattatatcctgtcaaagttaaatttccaattgtatgtaaatatttatcatgtatctccttatagttatctcctagtgattccttccatttatttgttaatgtctgtggcattatatgctctatatttagcatattattattgattaaattttctaaatcaacaatttctttattattataattctctaacctctcaagtatatataacttattctttgacttagtattatatatatctttagtttcaaaagcatttgaaaattcactgtcagtaggaaatctttgagatgatttcttatttataaaaatatatcttaatatattagaatagttttctttataatcactaaattttttaatttcccttcctaagttcataaatactttattcagtgcattcggaggtacatcacatactattcttcttaatataaaacattctactaaattaagggattctacaagtacttttttatttattataccttcattataatcattaaataattctaatataaacggatatgatacaaatatttcaagtttgtttatccttttcaaaactttgtttacatcattatcatcagtacatgaataagatatctctctataatagttagaaaatttaagtaaatcttttaataaaatttctatatctataccattatctgatacataccttttaaaactaaaatatactttatttttattcggtatacttctctcctttatagtcaaatagtctcttataaagctacttacgttgctacttgtatttttttcaattttataccaataattattataaaattcctcttgtaacttagagcttctacccattaacacaaagtttcttactctatcagcttcacttaaatctaagccagttgaatttagactttcaaagattaattgagggtcatcttcaccattttttaactctatttctactatagttaatttctgtatagcatcaaacaaatcatctattgatatattatcttcttttattctattataaaaatataaataatttgaaactatattagaatttctatctgtattcatttcttcttcaaatagttcatagtaagcttttctatcttctgctattggttttaactttatttttccatctttatctcttgagtgcttgtttataagataacactccttaatctgttcttctgttgtaataattccttttgattctccaaactcttttattatttgacacatggcaatcaataatattgacacagtagtcactctttgttgtccatctattattaaatattcttttcccatactatatatagatacaactgaccctaagaaatgagttctaaatccagaatctattatatcctctaaatcatcaaacaatcttttacattgttctttcttccagttataatttctttgatatacaggcactacaaaacttttgtttgacccctctaaataactaagaaattcaatttctcctgctttcatattaactccccctataagttaaataaattccattcataactccatgtatctatatattatatcaaaattttgactcataaatgtatatgaaagccttattatatacctttttatacctatttttattttattaaagtaaatacatgattattctataaaatatacaaatacttaattttaaaaattattatttaatcttcttcatgagtaattcatagttatttatcaattaaaaagagatattgcataattattcaatacctctctttgtatatttacattatccatatctagttatctatttcaacccaatattagactacctactaataaatttattctctacataattaacaataattttgcactaaataacatcattagcctatctctgatgcattttctttaattttatttatagttttaatcaatttatttctctcttcaatatgattttcaaataaatcaattatacttccaacagttctaaatgggtcttccatcaacactttgttatcctctataaatccattcttgactacataatcgactataagtttaacaaaatgtatttgcttagtattaaaactcttattatttaaaaactctgaaaaagcttcatttgcagcttctctatccaatcccactagttttctcactaattgacttactggagtatctccaaactcctttttataatcatcacaattacctaactgctttaagagtatttcctccaacgtttcaacatcttgctttgttatctttttattatttcttaatttaaatattgctaattcatctttatggctatttaaataatactctaccttctttttataattcttaagattgtttgcattatatacagaatcatttctatcttctgctacaatcatatcttcaaaacttgtataatatatcttttgactagacttttcaagatacttaataagctctcttaatgatatacgtacttcttctacctcaaatatatctgaatcttcccaaaaatcctctgtcattgctttttcaatagtatatttttgttgctggatctgtggtatagtcccaagtttcgaaagtttttctgctgtaaccattacatgccttatccctttacttgcattattattttgtaagtatgcaagttgtatattatacataactacatcaaatcttttagccaattcatcatcactatatgaagttatgagtggtgatatatattctcttatctcattttgtgctactgctccaatattgctccaaacattttcatttttatacttatgtacataacttaaattcatcctaactatataactatcctcatttaaagcttttacagaagttataagttcttctaacaattcttttctaagttctgcatacttaccttctatatatttaatatcttgaagttctttaaccatacttacctttatattaaataatttttcagtaagtgtttctgctttatttccctcaaatcctttaggattaaatttaaaaaattcaaaattattacaaaaatcaaatattaagaatctttccttatccatatcaacacctaataaatctggacataatctagttcctctacctatcatttgccaaaacttagtcttacttctcactttcttgaaaaaaacaagatttaggatttcaggtatgtcaattcctgtatcaagcatgtctactgaaactgctatttgaggtaatttattcttatcagaaaaatcatctattatagaatctacataatttatactatagtcaactgcttttacaaagttcccaccatactttggatacagtttattaaatctttcaactattgccctagcatgctttgtattctttgcaaaaattatagtcttaccaatcttttcttctccttctattttcaacccctctgtcattagcttatttaaaactaaatctattgtgtcagaattaaatagccactcatttactgcattattccctatttcgtctccaatactctcatcatcattaaatgtattttcatattcttccttctcttcatcagaaagctcatcatacttaattccatcttccataatcttagtcttaaactcaatactagtataatctactaaatatccatcctcgactgctttattatactcataagcatatgtaggtactccattttccatgtcaaaaactgaataagtatttttatctatctcatcctttggtgtagcagtaagacccattaagtaagaatcaaaataatcaaagattgacttatactttttataaatacttctatgcgattcatctattataattaaatcaaaatgaccaggtgtaaacaatctctttccatccttagacttcgtatcatcaattgcattcatcattgttggatatgtagaaaatatcatcctagcatcttctgggctgtctttgctatccaataaattacataacgccaagttaggtaatagcttagtaaaactttttttagcttgctttaccaatgcttttctatctgctagaaataatatatttttaatccaattatgtcttgaaagtacatcaactatagatatagcaattcttgtttttcctgtaccagtagcacataccaaaagagttttgcgttgcttattttcaagagcctcacatacagccctaatagcttctttttgataatatctattggatatttcatcatttattgttacagaacttaaagacttcttactctttcttctatctatcataagttgtaattctgattttttataaaatccataaacttttctatctgaatagtcatcccaaatatacatatcaaaaccattcgtcaaaaatattactggtctttgactatatctcttttccaaacaatctgcatataatttagcttgttgttgaccaattttcgggtctttgctcgttcttttcgcctcaactactgctaatggcttaccattttcaccataaagaacataatctacatatcctacaccactttcattaggcataccttgtacttctatttcctcccctatatcttttccaaattcccaacctgcaagctttaattctatatttatatatctttttcttgtctcaaattcgtttacttcgtctatcttgaaatcgtagtttacagtattaacttttctcttttcagttagtgactttcttaatttctcattttcttttattacttcttcaagctttttatcttttgaacttaatctctcataaagatttttaagctcgtctggtctcgtccttttctcttccccatgaagtaataaatcttcattaaagtcttctgctgtatattcatctgaataacaatagtctatccaactaacaaattgatgcaaattgttaagtgaaagtattgcttctcctctctctatgttcgcactagtatgtacagataaattacctaatttaactatatattttaataaaggtaacatatcatagtctataagttctataaaactattattatgaatcaacgtactaagattatcttgataaggcaatactaaatcactatcattagcatatagccattttactgcaagctctaaagctcttcttgttatagttgcacaagtagatgggctaactagtatacttttttctgcttctaagcaagcagtattaaaactattgaaatttttcttcttttgtaaaaagtcaaaattacccaaggcttttctcccccttttgtcccttagttaaaataaatctctctaaaaactatttcttacagctgtttcttatactaacaaatacttcttcattttctgtaaacaattcgtacatatcttcaaactgtggtatatcatatccatgagaatcatcatttctcaattttctaagtgtttctataactatagaagaatttttaggtaataaattgtgatactcacaagctaaaaggtagtcataaaagtttttagattttatgtttaaatcaattgatttataatacaacattgcttttgttaattctaaaaatgagaccatatagcttttaaaaccttcttttatgtatctagcccataactcaggcatttcttccttatcatataagattttgaagttttgcaggtcatataagcaagaaccaaaatccctatttacttcttctattgagttccaagataatttgtttctaattaccatacatgtccctccaatctaagatatctattacatcactgttttcaaaatagaatttatttatataatccttaaaatctttagattcataaataacttcaccttctaaaatagcttttttaagtgctattgtataattatctgtaacaatttttaggtctacatcaatgtctaatatatttcttagagcttctgtcttagttgcaagttctgtaattggtacttttttgataggaatccaagctatgtctatatcgctttctgatgtatgtttatctgttccataactaccaaatattatgattgctagagtattttcttttggaaatacatttattattgagtttttaatctcatttggtatatttctcatttaatcacctcttgtttattaggtaatattgcttaattgaatttatatccataatcttttaatctatttatacatatttctctttcttcatcagtaaacaactctttatacttttcttttaatactaatacttctaatgataaatctaatctcttacactcccatagccttgtaaatccttcagtagctccttctttattgattaattctttagcagctaataaggctcctttgttatttatcagttgtaaaaatcttgttggcttatagttacattgtaaatcagcttctttatagatatttaccatgtcatgatataaatctagctctatttgattcatagattttattcccccattttaatacttgtatttcagttgaacaattctcctttaaaagctttttgcattaatgagttaaagttatcttctagttcttttaagctagtttccatttcaaacttcaaagagtttacttgtttaacgaagttggcaaattgattttgaagtctaataggaggtacaataatatttatttttctaacagcatctttagttatcgtttttgttacagctcctcttactttctcttttattttactttccatataggatgttagtaaaaggttatataagaatatatgattcactttatcttcattaaatctaagcataaattgattcatagctaaagatactggtttatttaaaaatggcattaaataaactttacctgcactacctatcttatttattataacctcaccaccaaacacctttgatttttcaagataattatatgcatgttcatcgatatacttaacacctttttcaaagttattattttctaaatctgtagttcttaccattaaggcataaccttttgtatctaaaagagttacattatctcttaaggtttcataactaccatttgaatgataatcagttaaaacatctaaatatttccctatttctgaaatttcccagtttttttcgttctttgatggggtaccaaacatctcaataaatcttgatttaactaattcatccaatacttctatttgctcttttcttttatctattaactcttgagccttgtctaaaacacgcactaccttttcttgcacttttaaattatacatgcgtatttttatattagctaatccttcattatttaaagctgattgtgtagcacctttacttaacctatttttttgatttagaaaataactactatttaagtaatggtataaatattgaggcaatatttcttttgatggttttaaaacataaaagccagtcgatactattatatttttattagttttattaataactagtgttttctttgtgtccttcatttttgcaaatataacttctcctatatttacagtttgatttgctctagaaggtttattttcataagtaactatttctagattgcttatcttgttaaaatctaagtttccagtactaagatatgagcgttctccatcaaacttttttacattttccctgcttatactaacaacatctaaaatttttgcttcatcaaccatactctacacctctaacattctttctagttcctctaatccatccactatctctttctctaacaccttaaccctacctataataacactaggagcatcataaactacttcctcatacactacctctttatacttattaatagataaatcatacccattctctcttatctcttccacatcaacaaaaaagctttgctctgttctttttctatctacttccccatcaagattatcaaatctcttaataatatcctctatatcactatcctttatctcatttctcttatcatccaaagaataaccatcagctttcatatcatagaaccataccttatcagttccacctgtccctgttttagtaaatatcattatagctgtagatacccctgcatatggcttaaatacaccacttggcattgatattatagcttccaatttatgattatcaactatttcttttcttatcgatttatgtccacctgttgaaccaaacaatactccatctggcactatacatgcgcatcttccaccaatttttaaaactcttaaaaaaagtgccaagaataataactctgttttctttgtcttagtcacttttaataaatctgctgacactgcttcataatctaaacttcccttaaaaggaggatttgctagcaccaatgtaaacttatctttatctgtattaacctccgataaagaatccttatactctatattaggattgtcaacgccatgcaacatcatattcatagcacctattctaagcatagttctatccatatcaaatccatagaacataccattattaaaatgctccttcagcccttgcactaagaaaagacttgaatgattatcccttaagtactgttgtgatgatactaaaaaacctgccgaacctgctgccgggtctactataatatcttctggtgttggtttaataagtcttactatcatatctattatgtgtcttggagtcctaaattgaccattagtacctgctgtagccactttggataataaatactcatacaaatctccctttgtatctctatccttacttaattctaaattactaataccatcaactattttagataacataagaggcgtaggaattttaaatattgcatctcccatgtactttgcataagctgattctttatttccatgtaatttttttatgaaaggaaacacttcattttgtactatttcatacattttttctgagtttccttcattagaaaacttactccatcttaaatgttgatgttcatcatcaaatatcttttcaaaagaaacacccaaaagagttgcttctgcttcattttttgtttctacttcatccaatcctttaataaataaaagatatgtaaattgttctataacttctaatggattagttaatccaccagtccaaaatgtctcccaaatcttgtctactttactccttaattctcctgtaatcatatatgactttccctccagtgttcataaaataatttaaatatatattttagtcgtacgccttaatagttagtgtcttatgttaaatccaagtttttactacacaattattaaattatttttcccatttacatattttagctaaaaaactaatgcaatactcttattttatgattattatatataccatacaaaattattttatcatatatccatcatagaagtcatctacctggataactcttaccatattataactttttaatattaatttaaacttagaaagaaattttttatttaattatatcatcttccttatttcaaatttctcaactacaatcctaatcaaaaaataaaataagatgctgtctcaaaatagatataatcttcttttttattgtcagaatgatgaaaatatatttgatttcacacaaaaaagagtgcctcatgaactaaaaagttcattttgagacaccccttaatttaatcttacttattctttccctttattattaacacttcactgtccctattgcttttcctacacatccacaaacttccatcctactcttaacaaaatctttaactgactctaaaccttttttaccatatttcttagggtcaattacctctgggtcagaattaagcacatccttaaccccattgctataagcaatccttaattcagttgcataattaactttgcaaatacctctttttatagattccttaataacctcatctggtattccagacccaccatgtaatactaatggaactgatacaacctctctaatttcagataatctatctaaatcaagctttggctctcccttatatagtccatgtgccgtacctattgctactgccaaagatgatacccctgttctctctacaaactcttttgcttctaatgggtctgtatatgctccaccatcaccaccatctaaatcgtcttccttacctccaactttgcctaattcagcctcaacaggtatatctgaaggcatacatgcatctacaacagatttagatattgaaatattatcttcgtaactttcatgagaaccatcaatcataatagaagtatatccaactctaagtgcctgcatagctagtccaaagcttgaaccatggtctaagtgcattgccactggaacacttgccttctctgatgctacctttacattcgctaaataataatctagccctgcatactttattgttgaaggtgttgtttgcaatattactggtgatttaagttcttcagcagcctctattactgccataaccatctccatattttcaacattaaatgcacctactgcataatgcccttcttgtgcatctaataatatttgtttagttgtcactaatgccataatttctcctcctatatgtttatactgatttgatttcttcgttatttaattttgatactatttctctacttgttttgctatttaataactcatttaaaaattcttcattcattaattttgaagatagttgagataatgtttttaagtgtaaattatcaccattatctgtagctgatatcataaatataatatgtgccaagcttccatcttctgattcaaagtcaaacccttcttttgatacacctactgctacacgtggtacctttactgcatctgtttttgcatgtggtatcgctatccccataccaaaacctgtagatgatatttcttctcttttaaggatttcttctttaaacttctttttatctaaaagaacaccagatttatcaagtattccaatcatttcatcaattacatctgttttattttttcccttaacatctaaaattactgtttcttcgctatataaagagatattattagatacgttttccgattctgcactttcatttttatgtccatcttttgttgcatttgtattttctatagtatttttctcatttactactttaggtgtaaccatcatataaagtacagcacctactaatgaacctacaaatatacaccctacccataaaagtggcttattgactaatcctagaaccaaaaaccctccatgtggagctggtacttctattttcattatataagttaaaattgatgatattgatgatgcaatcataagtactggcaacacttttaatggattttttgctgcaaaaggtattgccccctctgttatatgagtactacctagtatataattgattaatcctgctgctctatcttcttctgtaaatctatttttaaataaagtagatgctattgctattaccaatggtggtgttatacaagctgcagatacacctgccataaataaataatttccctgtcctagaagcatagttccagttacatatgctgctttatttactggacctcccatatcaaatgctgacatacatcctattactattcccaaaattataggacttgaattttgtaaccccgatagaaagttcatcatagcattgttaagtgctgaacatggtccaccaagtaacaacattgctacacccacaagacctacgctgacaataggaattataaaaatcgatttaagaccttctaattgtcgtggtaattttcttaacaaatgtacaaatagtttaactaagtaacctgctaaaaatcctgatatgattccacctaaaaaccccgaacctgtatcaaatgatatcattcctccaacaagtcctgccaacataccagctcttcccgatatagattgagctataaatgctgccaatacaggaaccatcaagttcatagaatatccaccaacagattttaatgtagctgctatttgattatattgttctgaatttgggtcaaatgaataaatcccccataaaaatgatatagcagtaagtactccacctgctactactaaaggtaacatgtgagatacaccattcattaagtctttatacaacttttgaccaaacgataaatttccttcttctgcaattttactgcttgataagtttccttttctaatagctacttttccatcaatacacctttgtataagttcattagccttatgtataccttctttgacaggtacttctattaccggctttccattgaatctgtccatatcaacatttttatcacaagcaactattattgcatctgccatttcgatatcttttgctgttaacttattttctacacctatagctccattcgtctcaacttttatgtcacaccctaattcccttgctgaattttttaatgcttcttctgccataaaagtatgagctattccagttggacaacctgttacccctagaatcattttctttcccatctttataccacctttctgactcttatattttttatataatcttccacattctccaaattacctataccattactttcagccacacttgctcctgttgctgctgacctttttaatgcttcttcaatatgttctggattttccaaccatatacttaaaaaagcagctaatgcagaatcaccagcacatgcagagctgactactgtaactggttgagcactagcataataaattgattttccattataaaaataagaacctttttctcctaaagttagcaatatattttgagcaccttttaaatgcagtaatttaagtacatccttaatatcttcttcatctcttacaataattccaaatatatctttgatttcttcatcatttggttttatcaaatatggattatactgtagtaactcctttaattttggtgaacttatatcgagtattgtctttatacttttatttttacaaattttaaatatatcctcatagtaattatcatcaataccaggaggtagacttccacttattgataagtaacttatatctgctaatgactgtatcttatctagcatatctagtttttgtttttcgtttacatatgacccagagtttacaaatttaaattcatcacttccatcatttaaaaatatatttatacgagttgtatcttctacccaagtaggtaatacgtcaaatcctctcttttcgctttcttcaactatatattttcctgaaaatcctccaaaaaatcctaatatcttagattctataccataatgacctagtacaaaagttacatttaatccctttccattaggagaatatacagcatttgatgtacgatttactaattttctctttatcccattagtagatatattcatatctattgcaggattcgtagttaatgtatatatcattgtcttcccccttgcttgtgctgtgtatgttttcattataataaaaaagtctatgaaaatcttttcacaaatagaaaatcgattttcatagacttttcaatttaattttcagaattattatatctgaccatataatctataattatcctagatataatatacaagggcaatctggaagatacttcatattcagaaattgatatatgttcatgtttgtatcctacaatatataaatccgaatactttataagttttgcactttcactacaacagcaagttataaccttagctccaactaaattggcattctgtgctgattctacaagctctatggtatttccattcaatgaaaatatgattataagttcgtctttttttattgatttagattttattttcattatgttggggtcatttataaaaacaacattaaaatcaagtaattgcaatttaagactaaactcttttgctacatattcagtaagccctcttgccaaaatatatatcttactagatttatttatagtttttattatattgattagtgtagttaaagatatttgttctataactctctgtgcttctataaaggatttatttattatatcccccatattttgtatatcatcattttcatcttttactgttaatctatacctaagttcattgaatccatttaaaccacattttctaattgctcttgaaacggttgctggagatgaatatgtttcatgagcaatctctactatagataattctggtaatattgattcattttcatttataaatttaattatttcaagttccgtcttcgttagattttcagaattacttttgtttagctcaattatcatatgttatctccccttatataagttttatttgtctaaatttatcgagtaatataatatattacctcttaactacttatttttatatacaattaagatttagtcaatgtctatatatgtaaatttataatataataattttatgcttcaattaattatgtaattattagagtattttgtaataaaaattggagttactcaattactgaaactgagtaactccaattcttacagcctcaaattaactcgaattattgaaaatgattcataaacattatcctatactctcacttatcaatttatatacttgagtaatacctttttttattaacagaaatcatcttactaacaattgaaattgtagttccagtacataatattgaaaatatagttccaaaccctaaatttccgcctaaatatacacctaaaattaaaaatattaaatctgctatagtttttaaaactttatatggatacttaaatttgccctcaatatagattaatatagcatctaaagggctcattccaatgtcaaattttataagcattgcaaatccactacacataagtatatgtccaattataaagctcattattctaatgataatccctaaactacttatattaaaatctaataataaatatatatacaaatctataaatattcctgctactaatacataaacacagcttcctaatcccaaactttttttattcaataacaatgctataagtaatagagttccattatatattagccctgctattgtataacttatacctaactttatatgtataccctcatttaaaagtgtaattgcatcactaccaaggcttgactgaagtataagagatataccacatcccagtatatttataattaaaattacaaatataaatttttttatgacattcataattaataaaccaccttatttataattataatccctcttataaaactgtattaataacatagtatttataagagggattatttatatttaaaaactatctactttttcttttaattcttctccattagttcttattacatttttataccaataaaaactatcttttttgtaacgttctttgcttccatttccattgttatctatatctacatatataaatccatatcttttttccatttcttgagatgaacaacttactatatctattggcgaccacatacaataagctaatatttcggttccatcagctatagcttcacctatttgttctatatgttttcctaaataatctattctataactatcatgaacttttccatcttcaaatttatcatgcattccaaatccattttcagctatcattattggcttttgatatctatcataatattgagataaagtattgtataatcctttagggtcaattgcccacccccaaggatttgcttttaagtattgattttttacattatcaattggattcatggtatttttacttgctgatactgttgtagagtaatagtatgatagagctagaaaatccatagtattctcttttaacactttatcatcaccttcttccataactatatttatgttattttctttgaagaatctcttaatataagctggatactcccctctaaaacttacatcagtaaaaaaatattgtattctatttctttttaaagcaaatactacattttcagggtcgcaatcttctggataagatgtacaatctgccatcatcatccctatcatcatatctgaatttatttcttttccaagcttcttagttaaagctgtagccatgaattgatgatgaatagcttgatatttggcctcttctacatcatctacctggtctacacaaaatgcaactgaattaaatgattcatgatacattaaatttatttggtttataactatccaatatttaactttatctttgtatctatttaatattaattctgcatatctaacaaagaaatccactacttttctattagaccatcctttatattttaatactaaattcaaaggagtctcataatggagtagtgttacaataggttccataccattatctattacttcatttataagattatcataaaactttaatccctcttcattaggctctaaatcatctccatttggaaatattctagcccaatttattgaaaatctaaaacactttaaccctagttctttcaaaagctttaaatcttctttgtatgtatgataaaagtctattccattacgcttaggataatacccattattatctttcatagcaaactttattttatctacagtcatatcagactcgtaatgtttagatatatctctatctttatcatacatatgtacatcagctaagcaccaccctttgccaccttcattccaagcaccttctaattgattagctgctacagctccaccccacaaaaaatctttaggaaacttactcaatttaatcactccttattttatttatttaaatcatttactattatttaccttatattctatagactttactattcctactaaagacatagttatatttaactcgctgaatattgtcataagagtatcttgagcatgtgcaaataaaagtgaatgtgctcttttttctccactagcttccccttgtataatgttagtttgagctctatgtgcttctgtcataaactcttttgctttagctagttttaaatcagcatttttataatcaaacctttctaaatcattaagagcatgtttaatttctgttctagcctcacctgcacgaagtattatttgcattgctacttctactaattcttcatctattacatgttcttcagttgtcatatttataatttcctttcaacatctaaatttaagcttcttgactctctaattttagttcttctttttcataagctttaaaaaatggataccatatcatgaatagcaatactatatttattgctaaaacaataagccctctaacatcttgatttaccataaaagtagatataccaaaaggaagataccataaattaaacaccttactcggaattgtcacaaatcccatactcattgataagtaagtagttattgatattactactgttcctatccacataggtaacattaaaaatgggttccatgctactggagctccaaacattactggttcatttatgttcattatagaaggaacgatacaggctcttccgattgcttttattcttccagctctagataaacacatcattagcactagtggtaatgttgctccccacccacctaaagttatccaacctgtttgaacaacttcataagtatatatattagttgcaagccctcctgatgctacagctgctgcattagctgcaattgcactaagctgaattgcataagttattggggataatacccatccacttatacctaaagaatataaaaatactactaagaagtttaatagtacaaatccaggcaatgtttgtgctatatctgatactggtttaaatatcctaactattatttcaaacatatcaaagttaagtccataaattagtccccaacctataaacattattactgctataggtaacatactatcaaaccacttacttacaaaatcaggaagtgctgaatcttcaccaaaaaatgagaaagacccaaataaagacattattaatccggagaataatcctgcaactagtgctacaagcattccttctcctccaaatctattgaagttaaatatagctccttcattcgtaatctctggacgaatcatcattaacattaatccagcacctgcaagaccagctactacactcatactttcaaatttcttattcttcattatttccataggtaataaaaatgctataaatagtcctaaaagtccaaatgtatattgatttattggacttaaatcaggtaagaaacttatgtaattcttcaagacagaaactatagttactaaagaacctacaaataccataggcaaaactttcattatagttgattgaactgattgtacccatatattcttagttatcttatttacaacaggagtaaacttttcacttaacaaatctataaatttattcataaacaatctccccatagatattttatttgtttaatattaattctaatgcttcttctaaagcctttacaccatctaatcttccatatgctgttttagatatacatgctactggaacattatattcatcagcttttttttgtatttcatctttcatataatctaaatgtggtcctaataataaacaatctatttctggtaaatatttatctatctctgactcacttctagcttttatatctgcttctatgccttttttctttgcactctttctcatactagttgccataaaacctgtacttgctcctgagccacatgccaacaacacttttatattcttcataacaatacctccagtatttttattcattaatttatttcttaatgaatttttatttgatttgattgtatttatattgtacttcctaaataatttcctttcacataaatatatttcctaataataggaaatcatttactcttaaccagacacataaatatatagtataatgtacattataatacgtacattcaattatataaatatcatatcatacagattttattttaaaactatgagagggaatctaatgaaaacatctaaaaaagagttatttttaaacttcataaaaacgcaacatgattggatagattcatccacattagctaattatcttaatgtatcaacacgttcgattagaaaatatgtaaatgaaattaattctactggtgaatttatattatcctctaaaaaaggatataaagtaaatctcaataataactgtcaaaccaaggttgatagttcagaaaatatatcacctgataacaggttaaatttaattttaaaagaacttatagttaatagtaatggaattaatatatttgatttaagtgaagaattgtttgttagtccagctactattgaaggggatatagtcaaagctaataaatttataggaagttataatttaaagataaagcaatcgaaatttttattgaaactaattggaaatgagtctgcaaagcgcaaattaatgagctctataatatttaaagaaacgggaagtgattttttaagcttatttgatgtacaaaaaatatatcaagagtataatttgaccaaactgaaagaaaatataatatatatattaaaaaaatacaatttgtttataaatgagtacgctataaataacatacttcttcatttaatgataactatagacagaataaaaaagaataactacatagaatctgtcgaagtagtaaactacatagataataataatgatataagcatttcaagagatatatcaaattttttagagtctgaatacaatttaactttaactagtgcagaattatactacttagtatttcagttaacaaacaaaaccacagtcttaaattatcatgaaatggatactaagtcattgccaaattatatagatgaacattttgttaaattaactaaaaaaataattaaaaatgtatatgacttatactttatagatttatctgatgatgaatttgttgtaaaatttactcttcatgtaaaaaatttaatcagtagggctaaaaataatcaagttttgagaaatcaaatacctcagaagttaaaagattcctaccctctgatatatgatatatctgtttatatttgtaatcaaattcaaattttagaaaacatagaaatagatgaagatgaaatatcgtatatatctcttcatgtaggttcattttttgatagacaaaaattactagaagataaaattctctgtgcattaattactccaaattactatgatttacaattcaaaatagtaagagacctcgagaagagatttaatgaatccatagaaattattcaaattttttcagatactcataatcttgattttgacaataaggtagacatggttattactactttaccaattagtgatagatgccctataccttttgtttatgtaaatccttacctaaacagaaaagattatgataatatccaaagtaaatttattcagattaaagatagaaaaaatatacttactgtacaaaatcatttagaaatgtactttagtgaatctttgtttatgaaaaacatatatttagatagtgctaaagattacataaaatttatgggaaatattctgtacaaaaataaatatgtcaaacccaattatatagatgatgttcttataagagaaaaaatgtcttcaactgcatttaataacaatgtagcaattcctcatagcatgaaaatggatgctttaaaaactggagtatgtttaattgttaacgataaaccagttaaatggggtgaggaaaaagttcaaattatagctatgatacctataaatgaaaaagaaaaagaaaaattcaattacatatttgaaagctttattgaaatattatctgagtggaataatgttaaagaacttactaaggcagataactacagtagttttatgaatagaatagcttatcttattcaaaatatctaaatccattaatttatttccaatatatgtttcttaagttattaacacaaaatagataagctgtcacactaaaaagtctaaattaatatgtgacagctttttacctaatatactttgctttaatactacatattttttgattgttgtatactagttataagattgaatatttgtgttgttgtagctgtcatattctcactagcagttgctttatccattgcttcttctattgtcatagctctatttactatagaaaaataagcatctataccctcttcattacatttaactgcatcttctgttgtggctccagccaaacctattacttttaccccatatttttttgccagttttgcaactcctattggagccttgcccatagcagtttgattatccaatctaccttcaccagttatgacaaaatctgcatcttttaactcttcctctaatttaatttcttctaatattatttttattccagattctaattttgaatttaaaaatgctaaaaaagcaaaacctaatcctcctgctgctcctgctccttctacattagctacatctttacttaagtaatttttaactactttggaaaaatttctaagcccattatctaactcctcaattatttctgatgttgcacctttttgagacccatatatgtatgcagctccatttttcccaaacagcggattatttacatcacaggctattttaaacttacattcatctaattcctttaatctattttctatttttatatgtcttatttcatttaaaacttttccacctaatcctactaacttgttattttcatcataaaactcaaaccctaaggcttgaagcatacctatcccagcatcattagtagcacttccacctattccaactataaaatttctatagcctttatttattgcttcctttattatttccccaacaccataagttgtagtgtataaaggatttctaagttcagtcggaaccaatgttaatcctgatgcttgagctatttctattattgctgtacttgtattttttaataatccatatgttgcatccacttttttagctattggtccagtaacttctatagtctcttttttaccattcatcccttgaactaaagcatctactgtcccttcaccaccatcagcaagtggcaatatctttacttgcgcatcttctttaaccttcaatatccccttttttattgcatttcctgcctctattgaagataaacttcctttcaaagaatctatagaaattaatattttcatatttatctactcctttttatttactctttattttaaatatataattttataagcttaatttatcttttattttatactctatatttcactttgtatacaacttatacccttaatattcttttatcttataaaaaagggagtgtctcaaaatgaactttttagttcatgagacactctttttgtataaaattaaatatatgtttattatttcaacaatgataaggaggattatctctattttaagataattcctttttagcactatctaatcatttttagcactatttaaccaatatagttttaacttggttcattaggcactctacatttacagagttattatctattgatatagattctaattctttttcatttaggttagtccatttagctgttttaatatttttgttaaatactacgttagctgattttgtttcttctttagaattgtaaaatctaactactaatgcctcttctttttcagccttttttacaacacttaacacaaggtccttattagtttccttaagtaaactatatgaataatctacttctatttctgattgattcaatttcatagcattatatggtattttattataagtttgtatttttgttaaatactctttagccatatttgcaacatttgcttctagtgtagatttttcatgagtgactattgctaagtctatttttatatctcctatcatttgagaatctggagtaggcaactttattcctgatggacgacctgggcgtcttgccatttcttctttacctaggaatcctacacttctaaataatgttatagctattgtgtcaaattttttccctactatttcaaactctcttgtactgtttgtaagaacagctactccatgctctttgtcagacaatccaacgaatgttagcattggatatatagaatctggtctttcactccattcttcctgttgccaaacttccatagcatcatcatacacacttctctttatatgtccaaactgattatcagacacagaaaactttgaagctatatttgttggtatataagttctaaccctacaatctcttgcttggttatttatattgaatactacatttattatagctttatcatttggaacatttataactatatcaaagtcaataaatgaatctgctctattattttttctagcttgtatatcttttggtacttttaatctataatttatctttatctcattattaaatctatttttctttatagtggaatttgctactatattatcgttaaatattaatttctcatttggaagtggtgaaaaatcatactcatctccttcatctcctccattttccatcaataatacattttcaaaagttttatttaattttttatcagatatctttaatgtcccgttttcattaacttgaatagtataaaagtcattatctaccatgtcacatacttcataagctttttctaacatatgttcaacttcttttatcatatacgccttataccccattgcaggtattttatctttaaagtttattgtatataccataaatgaatcatagtttccataatgaacaatttgacggtctattaatcctgcatctattacttctttatgtaccacttcaaaatccaacttattattatctttatcaaatatttcaaatgctttcattttagttataacttgggcgttcactatttcattcctattgtaaggcattaagttaaatgctactaacttatctaaagccatttcacaactcattgcatcaactattcttcttttgtaaaatgttattaattggtctactttttcctcagctaagaaaaatctattcattatttcctggtgaactttatctgaacaacaacatccaatgctgtcatgagcatgatttttcattatttctttccaaattaactctattaatccatgatgatattcaaatcctagagaatatgcaatagaagctagtggctccaatatgttggttatctttgattctattctagcatttgctgattttatatccattcttgttgagaatatacttctatgaaccctcatatatttcccatctaaaaattccccttttattgtatctatatccttatttttttctagctctttaaatatgttttcatatctacttaagaaaaattttctctctggataacattcttttaatttatatataacttcaaatatattcttttgaattggcatttggtcatgtccatttggaagtattatatggtcagtagttgcacccttatcaagaaccggtaaatatttatccattcttgttcttagctcatcttcattcattggtagatattttcctattgcataacctaatggaagtatttgaaccaaaacagaagacccatcatcactcttccaattaaactctgttttattagttccttttctttcagaacatcctctccaaaacattgagtattttatatcaaacccatttagtatttgcggcatttgagcactttgaccaaatgaatctggtaaatatcctattttcatatattctccaaattcatcacaatcttttattccatacagtaaatttctaagtatggattctccaccaactaccatttcatcagtttgagtataccaaggacctattattagccttccttcttgaactaatttttttattctctccttacattcaggcttaactgctaaataatcttctaatatagcagtttgaccatccatcacataatatggatagttatgattattttctaacatatccattatttcttccatattatttacaagtaatattctagattcctcagttgagaagtaccattctctatcccaatgcatatgaggaactatgtgtacattttttttcattgcttatcctccaaaacttatctgataatattttctgtctaattaaaaatccaataaaaatactactgagtttacacaattttttaatatttattttatcactataattaaacctttgatttaaatatctaataacgtatcttttaatgtatctttctttgatttttttgtttcctagttattattaataatattgctgatattatagctccaagtactgccgcaaagaaccatattgatgctataataaatcctgacatacttccctctaaaagcgccaatgagaatatccccgctccaggcacttgaagacctatattgaagaatgctactatagacccagttatggctgaaccagctactaatgatggtataacatggattgggtcctctatcataaatggtattgcaccttcagttattccagccaatcctaatatccaagtttgctttcctatttccttttctgattctgaaaataaatctctgcctaaaacagtagctattgtaactccaaaagctgagaccatcttaactgatgcaaatattgcataaggtataaaatttccacttgctattgctcctattgcaaatgtataggctgctttatttattggtccacctaagtcaaatgaaaccatagctcctattattgcacctagtagtattgcatttattccagtcatcccatttaaccaatttataagaccattgttaagtgctgctacaggctttcctattacaaataacatcaataaacctactaccaaagaaccaactactggatatacccaaaaacttacgaatccagctaatgtgcctttggctggtatattcttctttaaaaattttactatataaccagcaagtaaacctcctaacatacctccaagaaatccactacctattaaatcagctgctagacctgctgcaaatcctggtccaagacctggtttttcagctagtgagtaagacatatatgctgataatactggaaccatcaatgtacctaacatccctccagaaagctttcttaattgccataaccaagaaccttcttgattgtatagttcttgtaaaccaaatgcttgagatgctaatactgcaaatgcaagtatcatacctcctgccacaataagtggtattatatgagatactcctgtaagtattgctgattttacatcttttttccatgatgatttttcacaatatgatatatcagatgatttttctatataatcacctttaccttgtttttgtgctacttctaaagcttcgtatattatttcttttgccctttttagtggagctgctactgacgtttttatgtttggcaaatgttcaaatctttctgtatttttaggtgctacatctgttgcatatattattgcatctgccttttttattatatctggtgtatgagggtccaccataccattagctccttgcttttctacatacacatccacacctatttctttgccagctttaattaatgcttctgctgacatatatgtatgtgctatacctgcagggcatgctgttattgctaatacaattttttttgattcattttgaatcctaatctcttcttttatttgttctttcttttcttttatatctaagttattaaataactctttcttagtttttgaatttaacaacatattcatataatcttcattagacagtctagtaactaactcagaaagtatttgtatgtgtgtatttccaccttcactttctggtactgctattaaaaatattagctctactttattatttgagtctacgctttcccaattttctattggtgtctctaaggtcatagctgcaaatgcagcttctttaactgacttagattttccatgaggaattgcaagccctctttcaaaacctgttggagataaagtttctctgtacattacagcttctaaatattcctcataagatgttaacttgccttcatcatatagctttcttgctaagaactttattgcgtcttcctttgtttttattttttgttttaaaaaaacaaggttttcatttgtgattttcttaaattccaaaattacgacctccttaaatcatttaatgttatgaatatagcataaaataaatcatgaaaatgtttttttgaaattatacacacaatttcttcttaaaaaataaggatttgtgtatttatacacaaatctctatcttaaccagtattgttctattattgctctcataatcatcataattggaaccttatctgatatattgtacccatttacttgtttaattgttgaatagcaatataaacttatatctgcaatttgttgcaattgattttcacatatatgtgttagagctactaccttacaacccttattaactgctgtctttgctgcttctataacttctttcgtttctccacttaaactaagcgcgaaaaacatatcttgttcacctaattttcctatatcatgaagtacttcatgtctttggctatagtaagttatattatcatgcccacctctaatttcttttactaatatctcacataaaggaatgttttgacctattccataaactataatactcctagatttttgaattatatctgctactttatttattttttcataatctattagctctaatgtcttttttatatctgattcaaaaccattttttggctctttatcctcattttttaactcttcttttaaattgttttttagttgagagaaaccatcatactccatttttttacatagcctaactatggtatttgggacagtaaaaaatttatctgctaaagattgtattgataattttactatttcttctttgttttttctcatatactcaattatcatgtcttctgtatctgtaaatttatactcatatttttttgctctttcataaaattccatagtttctcctccatctattttattattcataagtaaaattcaaaaatattagctaaaattttcgttaatataattataatttaatatttttaatttattaatgcatactactctttttattatacataaaaaatgtgtacttcctatattgatagagatgattcaggtttttattttgatacatctctatcaatatttttttagaaaatacacatttttttcaaatacttatttttaattaaaactttaggtaatctattctttatatataattattagacttgaaaatatctttaaaatcaaccaattcaatattatttctttttaaccacattttaacttccttatcacatagcattgcatgttcatatactctctcttgaataagagaagatgattttataagactataatctataaatcctggatgagtaaccatcaatgttatatctttatctaaatttatatatttttcttcaaataatttaacaaaagatttatttaacttgtaaaaatcattctgaggatatttacttggcatgctaatacatgaatctaaataatagggacaacttggtataccgtattcttttgcagcatcacacattgctgatattgatacatcttcttctataccatgtatatcaatatactcaggcaatttactcatatacaacttgtaagtttcaatttgagcacaaacttcttcatatacttcttcataattaaaaacctctttacctgtcagtagttgcgttcttcttattttgctagaaacaaattttccaccttcatctaacaaattctttatcttaatatgttctttacaacaaggttctcctattactaaattaacatgtaaaccaaaacatacatcatcattttttaccatttctatagcttgtcttgaaaaaggcatattcaccatgattccagcacttgtaacaataccgttcttataagaagatattatccctagtgtaacaccttctgaatatcctatatcatctgccctaactactaatttcttcattttatgcatctgcctgctttctcaactcatcaagttgcatttccatctcatcctttactttaacaacatccgttcctatgatgatttgaactgatgtattactcaatttaattacccctttggctcctgtttttttaatattatcatcattcaaaatagtggcatccttcacttctaaacgtaacctcgtcatacaattattaagagtcactatattttcataaccaccacaatttttaattatctgcttagccatatatgaaaaattaccatgagaaagttttaaattcttttctttttcactaactttatcacctatctctatctcaacttcatgtcctggtgtttgtacattatcttttattattatatatttaaatgttacataatataatacaaagaatacaactcctacaggtataactaaccacgctttatctccataactaaaacttaagacatagtcaattatacttgctccattaaatgaacccaagcgagcacccagtaaatatagtacaactccacctagaccagaataaaaagaatgaattatatataactttggagatgcaaataaaaacgaaaattctattggttcagttactgttgccataaaagaagtcaatgctccagcggtcattgcaccttttacttcttgcttctttttatcttgtgctgttttatatatagcataagaaatagcaggtattgaaaacatcataattatgtaaaatcctgtccagaagaatcctgcatttgggtctcctgccataaatctaggaatttctcctcttataacttctcctgttgatgttgtatattcacccatttcaaataatatgtaagcatttaaaacttgatgtaacccagttggtattagtgcacggttacagaataaaaacaagaatattcctattgcaccagctcctcccaaccaaaaaccaaattgattcattgcagcttgtggatatatccataataaactaaatatatatgataaaattaaagcaaccactggtgatagtgtaattacacatttttctcctgcaaagaagcttaaaaatgctggaactttaactttatatgttttattgtaagtccatgctatacaagctccaacaattatcccaccaaatacacctgcatttaatgtatcattcaataactctaaatttgacttaaatatcatatatgcaactacggctgcaaccattacacttgtcttgtctttagactttgaataagcactaactgctcctaataaaaataagtagtccacatttgaaaatactatattagatatattagatatagctggcacattaagcatatttggaccaaataataatcctaatatacctgctgctggcattacagctattggcaccagcatagtctttcctaaaagtgacagttgttgcatcattttgtttaagaacctcttcatatccaatcccctttctatttcggtttaattttttgtgaaaacgatttattcacattttatattttaaatattatatttgtttaaacaaattgtcaatattttttattcattttatttttatcatttagtttcatatctaaatccttttaagtatattgctatatctagcctattttttaaatttattttttttatttttaaaatatgtttaaccatgtatttgaaacaacccacaaaatagttcaaatttatcctttttatggtttatataattctattttcactatacatgtctaaacacatttgatataatttgttcatatcagttcaataatattactaaagacctttaaggagggataggggtatatggctaaaaataaattttcagagatatatgaagtattgaaagaggaaatacttgatggtaaatatacaagtaatatgatgctgcctactgaacttcaacttattgaaaggttttcatgtagcagaaacactgtacgtagagcaatttctcaattaaacacagaaggatatgttcaaagtataaaaggcaagggtgttgtagtgttagaaaatagttgttctaatgatttttttctaaatatgcacaatttcaaaggtgtagaatcgattgtagaagataaaaaggttaatactgctactagtgttctccacttcagcaaaatcttaattgataataagttatctaaaaagacaggttttaaagttggtagtgaagtatattaccttcacagactaagatatattgataacatacctaaaattctcgacattaactattttctatgtagtatagttaaagaccttgatgtttctatagcacaaggctctatttataaatatatagaagagtgtataggtacaaaaattgtttcatccagaaagatatttaaaattgaaaaagctacagagcttgagttaaaaacgctacctctaaatgattataattgtgttggtgttattaaaaatagtgtatatactgatgatggaaagctctttgaatatacagaatcaaagcatacacctgaaacatttgtattcatggatgttactcaaagatattaaaaaaattatgtttaattaaacataatttttttacgtttagacactttatcccatactaacctcactattctatatacaattatatgtttatacaaataattatttattgtatattttagctttaatattagtttaatacttgacaatttgtttaaacatattataattaacttataaattacaggaggtatcaattatgaaaaattggtggaaaaaagcaactgtctatcaaatatatccaaaaagtttcaaagatagcaacaatgatggtataggtgatataaatggtattatagaaaaattagattatctgtattctttaggtgttgatttattatggttgactcctatgtacgtttctcctcaaagagataatggatatgatatagaagattattataatatagacccaaaatatgggacaatgagtgactttgaaaaactcttaaaagaagctcataaaagagacataaaaataatgatggatatggtcctaaaccatacatctactgaacataaatggtttaaagaatctaaaaaaagcaaagacaatccatatcgtgattattatttctggaaagatgctaaacctgatggttctgttcctaataactggatatccagatttagtggaactgcttggaaatatgatgaaactactaaccaatattatttacatttatttgaagaaactcaagctgatttaaatttggaaaatgaaaaggttcgtgaagaatgttacaaagtactagaattttgggctgataaaggtattgatggttttcgtttagatgtagtcaacctactctccaaaacacctggattacctgatgaccctataacagggccaaaaggagatggaagaactcattacgctgatggtcctcgtatacacgaatatttacataatatgaatcaaaaagttttcaaacctaaaaatatagttactgtaggtgaaatgtcatctactacacctgaagagtgtatcaactatactagagaaaatcgagaagaactatctatggtttttagcttccatcatatgaaaacagattataaaggaggcgcaaaatggactaatgaaatgttctctctggataaattaaaaaaagcacaatctgactttcaatataaaatgtatgaaggaaagggatggaatgctctattttactctaatcacgaccaacctagagctttatctcgatttggagatgatagattttttcgtcaagaaagtgctaagatgttagccataacactatttggtctacaaggtactacatacatatatcaaggtgaagaaataggtatgacaaatgcctactttactaaaatagatgaatatgatgatgctgaaagtaagaatgcatactatcatatgattaaatctggtattgatgaaaaggaggcattgcttatacttcaacaaaaatccagagataatgcccgtactcctatgcaatgggataatactatttataaggggttttctaatcataaaccgtggttaaaagttaataatgacaatattagtgtagaaaatgagcttaatgattctcgttcagtattttatacttatcaaagattaatcaaatatcgtaaacaatatgatatttttacagaaggtacttatagattgttagatgaaaatcataaaaatctatttgtttatgaaagagagtataaaaaccaaaatcttcttgttataagtaattttactcatgataatgtagtatataaattacctgaaacttatttgaataaattaaactacacaatacttgaaaccaattacactagagatataattgaaaataaaatggaaataaaaccttacgaaagtataatgatatattataaataaagttatttatataaaaattggtataacaccagggtgttataccaattttactaaattcaaaataacatttatagaatatctatagattacaataattatttgacttctacatcattatatttctttgaatatactttagtcatatagaaatatataggaactacaattatcatcccacctaatccccaaactatcttcataggttcatcaatacctgcttttatcagtaataatatacttataataactgcaaatattggtataattgctcctccaggtattctaaaatttacatctttatcagcatacttctttctcaatattagtacagctaaacatgtaggaatatattgaataaatctagatacaacacttatttgagataatgttgtgaatgaacccgaccatgctattagtaaagttcctatgacagatactataattgctatataaggagctccatttttattagtttttcttatagacttaggcattaatccttgttcaaccaaagcagcagcagaccttggtgtaaatatggatgatgcaatatttatacctccaacagatactatagttcctattgtaattatatacccacctataggacctagcatcttaatggcagcatctgcaacaggagtagctgaccctgccaagccattacccaacacccctatacttattcccagtataagcatatatattactgatactacaaacattaccattaccaatgctttaggtacatttttcttagggttctccatatcttttgctgcaacagctaaagattcaaatcctgtaaaagcataaaataaagttatagatactgctacaaaagctgatgacgcactttgacccttttgtattattacaaatggggtaaaattagaaccctttataaagaataatcctacagctataaataaaactattggtaataattttcctatagtcatgatattatttaagtgcttagattgtttcattcccataaaatttataatcccaagtcctacaactaatataccaattattatatttttaataagtggttctgctgcttgtggccatacagatgatagtgttacagcaaaaaaatttgccatagtagcccaagcaatcatactaactatccacttcataaatccaacttcaaatccaacaaaatctccaaatgcctcttttgcataaagataaggccctccatcagtatcaaaccaactacctgcttcagcaaaacataaagcaatagaaacagctaaaagcatacaaaaaactaatactaatatacttgctggacctatatctgtataagcatcaccaggtaacccgaatatacctgaccctattattgcattgattcctaatagtacaatactccaaaaacctaacttaatgcctttttccattgttattccccccaaagccaacttaatatatttatattttttatttagatgcttctttaactattgccataaatatttttttcatattatcataatctctagtcatcatttctggatgccattgtatccctattacaaactcacttccttccttttctatagcttcaattaaaccgtctttagatgtagctgaaacaatatatcctggtgctactttgttgacaactaagtgatgaaaactattaactaaaacttctttttctcctaatatttcatataattttgtcccctcctttatctgtactgtatgtgtaggtacattagatagatgttgctgattgtgtttaatataagcaccttcaattaaagataaatcttgatacaaactacctccttcagttacatttataatttgttctcctctacatatacctaaaactggttttttcatatctaaagcatgttttaataatttcatatcaaaactatctctctttggtgatattgcccccaacttattatgaggttcttctttccatatgagtggatttacatcttgtcccccagatagtataagcgcatctatattagatacctgctcctttataatctcatcatcatatacaatcggtacaatatatggtatagctttacacataactactgattgtatataatcattatttacataagccctttcatagccaggaaacattcctccttcatcaattagtaaattacctgatattcctattattggatatttctttttaaccaatttcttcaccccttaacttatttgtgaacaataaaaaatgctacttctcttaaagagcaagtagcataccaagattttatttatttgaacattataattcattttagaaatactttttttgaatacaagtaatataaataactttatttacttatattttattttaatcctgtttagtttgacttttttaaattgttttaagtacaactaataggtaaaataggcatttagattttcctttttatcaacctattaaatactgtttaatatattttttccccttctatttaattcacttccctttctaccagattcacatattatcaaatccagctcttttaacatattaagtattccccttacctcaccttctgttatactgtagcctaattcatttattgaattaacaataccatttctacctatatttttattaagattattggcattttttaaacactccattactaactttactttctctatagatgttctatcctttaatatgcttatttctttactaaaatcttcagttatatttaataagttatgaggtaaatcatttattaaaataacatcctcagaactcataatgttaatatacatagcagtattttttaattctcttatattacctggccattcatatgcattaataatgtcttgaacaccttgactaattgctctcttccttttcataaaatgctttaacataacttctatatcttcttttcgctctcttaaaggtggtatatttatgggcaatacatttatcctatagtataaatctgctctaaatctatctccttttatcatttctaataaatttttatttgtagccgcaattactctaacatctatatctattacattttctcctccaaccctcattacttgattctcttgtaatactctaagtaatttgctttgtaagtatataggcatgtctcctatttcatccaaaaatatagttccattgttagcctgttcaaataatccttttttacctccttttaaagctcctgtaaaagcaccttcttcatatccaaaaagttcactttcaagtaaattttctggcatagctgcacagtttatcgctataaatgactgactatgtcttggtgatgcattatgaatagactgagccataagttcttttcctgttccactttctcccgttataagaattgtataatcagattcagctattttcatacctaatttcttagttctttccatcttcgttgaaactgtttttatatcatcaaaagtatatctagcaacttgtcccttttctctaagcttctttgataggttttgctccaattttcttatataagttatttcttgaatacaaaaataatacccagtaacccttccaaaactctctatattatacttatttacgtttaagtacttattattaaattttataacttcatcatgtgccttactcaaactaaaaatctttttaatattctcattctctaattcatctatatttttccctataatattactttgaatatctagtatatcccttaaactattattgcaaataattatgtttcccttatctgataccattgccatacctaagtttgataaatttattatagaatttaattcatctgcttttatagtaagttctttgtatttagtatttattcctgaatataaactaattatttcatctgtatacttaattagcctctcagtaatttctttatcatccagtttgagttttgctattatttgaataaacgttgaactatcaatatacctatggcctaaatcaataacttcttctatatattttggaactaaacttgactctcctggcgttatagctatcttaatatttctatattcttcattgggattgtatggtataaaattcaaatggtttattcctatattgtataaattagatattgtttccaatacagtatgcttattatcgtttactactaatacatctatttcttctggcaatgaaaataacttatatatatccttttgctttatgctcctatttatagttattatctttgagacatcttctacatatttttttatttttaatactctatcatctatcattaccaatattatgtcatcttttattaattccttctctgttattttatttaaataataattttttatcattactttatctttaaatatcatttctagatttttatttaagaaacattctaatttagacaacccatcagttactactgctattgttttcatttgattactccttttaaaatatactctactcttttataatatacatctgattttcactttaatagcacaaaaaattgtacatttagtatactaacatattcctttattagttttatgtccctaaatatcatagttgcaatatctatcatatttcttaaacttctataaagcaaaaattgtgccaaattaataattttcttaattttattctaaagttcctcaatagtatttacagacttagcacttatagcttataagtctttatattattaatctatttttataggttaattgtacaaatcatatatcacttttacctattaaatgcattataaaaaagatggaataacgattcgtcactccaccttttttgtaataaaaaattgtatatataaacactatttactactcttctaagtacaaacagtatctacatactataacctttcaccattagattctattacttgtttataccagtcaaaactctttttcttaatcctagacaagtctccacttccatcatcatacttatccacgtatataaacccatatctcttggtcatctcaccagtagatgcacttactaaatctatacatccccatggagtatatccaaataaatcaacaccatcttctacagcttccttcatttgctctatatgtgcttttaaatactctatacgatagtcatcatttatcactccattagattcttttttatcataagctcctaaaccattttcaactaccatcataggtattctatatctatcataaatttcatttagtgcatatctaagcccttcagggtctatttgccatccccattcactagacttaagatatggatttttcactccacctaatatgttgccacttgtattatcttctttagaatcactacttacacatgtagacatataataactaaatgtataaaaatctacacaaccttcttttaaaatttctaaatctcctttttccatttttatttcaatattattttctccaaaatatctattcatataagttggatattcgccacgcacttgtacatctccacagaaataattcattactctactatctctttgagttttaactgcatcatctggattacaagtataaggatacattgttgcaaatatttgcatacatccaacttgataatttgaatctatttcatgagctaatttaacagccttagcacttgctacaaattgatgatgtaacccttgaaaacgaagttgaggtatatctacttggtttataaaatctgtagtcccttcatttaatattccttgtgataagtagcctcccataggcattgtagctgaatttatttcattaaatgtcagccaatattttacttttcctttatatcttttaaatattgtttcacagtaattcatatacaagtctattacctctcttgaaacccatccattgtatttctctgttattgcaaatggtatttcatagtgagatattgttattaatggttctatattatattttaaacattcatctatcacattttcataaaatttaagtcctgcttcatttggttctttctccattccagttggaaatattctagtccatgctattgaaaatctaaataccttaaatcccatttctgcaaataaagctatatcttctttgtatctgtgataaaaatctattgcttcatgacttggatagaatgttcctttttctataactctcgttattcttttacttactttttgagaacccccagtacacatatctgaacaagaaggacctttcccatctaaattccatgctccttcacattgatttgctgctgttgctccaccccataaaaaatcttttctaagtaccattactctacctccaataatttatttatagtaaatttattttaaaataaaaatacatatatctaatttttaattaataaaactctcttttaagctaaaacagttatcaattcctgactattatttacatgcttttgtgtattttctataatatccacataatcagaataattagtaacaactactggtgtttctaagcaatatccttcttttgatatgctttctatatcaaaagttattaatgtctgaccttttttaatcttatccccttgattaacaaaagatttgaaatgtttaccttccaactgaatagtatttaaccctatatgtatcaatagttcacaaccattatcagatataattcctattgcatgttttgttggaaataaagtcattatagtcccatcaaatggtgccactacttttccttctttaggtgttattgctacaccttttcccaatatacctgttgaaaacgctgcatcttgtatctgctccaaagcctttacttcaccttttattgggctatatactacttctcttttgtttttttctacaacgccttgcccattattatctttagaaatttctactatagaatcatctttccaaaaaaataatgttaaaacaaatcctactacaatagctactattattgctattatagttgcataaacacctttcatatctccagttgttggatttatataattaggtataccaaatattccaagtccacccattacataactttttacattcattatccccattacagctcctgccacagcaccacctacacaactatatatgaatggtgtttttcttggtaaagttattccatatattgcaggctctattacaccacatatccctgaaataactgcaggtatacacagctcttttatcttcttatcttttaatttaaagtacattgctgctactactgatgtttgtgcaaaagatggtacaaatgctcccactaatattgtgtcaaaccccatagtcataaggtttgacatagctattggtactaatccccaatgtagaccaaatattacaagcacttgccacaataaaccagttaatacaccacataaaattggtgaaaagttaaataaagctaaaaatccatttccaactatattagaagcataggtagctataggccctataaccataaatcccaatggtaaagaaactaataaaactgccattggtacaaagaaattctttactacatctggtattattttagcaaacactttctccaacttagctgctaataatactattataattactggtactactgttgaagtgtagttcattgctattactggtaatcctaagaaagttatatatactggtgattcaaatattgttccagtaaatagattgtataaaggttgacctatagatgctagagtatctaattgaatacctgaatagcataaaactgcacctataagcattccaataaatggttttaatttgaatttcttagcagctgtatatccaagaattattggcatatactggaacattgcatctccgattgcatttaacataatatatgcaccatcagtttctccatacaaacccaatgctgtaaatactgcattaaatccttttatcataccagcagcacacagaactcctaatattggttgaaaaactcctgatattatgtctataaacttattaagtaatccttttggcgcatctgaatctgaattatctattgtatctcctcctaatccagccaaatcgcacacaacttcataaacatctggaacatgattaccaataactacttggtattgacctgcacttttcattacagtaactataccatccattttttttagcacatcatcatttgctattgattcatcttttaatttaaaacgtagcctcgttatacagtgagataaactgctaatattatccttccctcctacattctcaatgatttcttttgatagttgttcatatcttctcattttttctcctccattttctttttgaaatatgaaggtttggccaacttaatgtcaccacccaatatatataaacctaattattaggatttatatctgacttaatacttttacttaccactctttcaacgtgaatagttaagtataatttttcctcatctgttaaatcgtagttgtattttttatgtataaattcatccaacttttctatgcatttataagcatttttatatttaacttttattacatttagtaaatcatcttcattattttcatgtaaattattactaacaattcgttctgcaaaatactttaagtgagtaataaatctatgataataaactgaatcttcatcaaatactattctgtaatggtatttaaccatatttgaaatttcttgtattatttgtgtaatctcatatatagtttttatactttgatccatttgtgcattaactatatgcagtgctataaatccagcttcatcttctgatagtctaatttcaaattttttttctatataatccaatgcttctaaccctattttaaattcactcttataaaatctttttatatcccaaagtaatacattttttacacttactccttcacgagctctttctattgcagtatacatatggtctgttaaagaaatataaatactatcatttaatcttttccctagtttttctttagcatataaaattatttcatctgataattccatatatcttataggaatatctgctattagttctttaaatttatcagatatatttgggtctgaaagtttgaatatcttatcaattttatcctttgatatatgctctcctgtacgttttttataagctaaacctctccccataactactatttccttatgattttcatcagttgtaataattacattattattgagtattttttcaataatcattgtgatgccccctttattagcattaagttaaaataaatcttttttaattatttagaatatttaaaatgtaatttattacataaaaaaaaacctatttattacacattaaatagactcccatgagtcctgagtaataaataggtttagcttgtatttaaacaatcactatccgtttgtattttattttaattattatttattatatgttagcaaatttattttttagtgtcaactttttctcaatattttaattctaaataaattatataaattgcatctgcaaagtactatttttataaataaacaaaataaaaaaggtattacttgctttaagtaatacccatttatttttaatttaagtggtttttcttaatctcatcaagtagtccatcttctaaataaatttctaatgcacatcctaccattgcctttactgctttgtgaagtttatcataagcttcctcagaatttgcataatttagaaattctttttcatgaacatataccattggacttatatctaaggctatttctgtatacatagtagggcaaacttgacttacattacctatatctgtagaacctactggaccatctttaccttctaatatatctgttatacctgactcaatcaaattattctttgttatcttttgaagtactttgttatttattatgttgtcaaaagaattttcaaagtatctataagaaagcttagctcctgtcattaactctgcaccttttgcacagtttataacttttttagtcacttcatctaaataacttctttcagcagctcttacaaaaaacttacaagctgctttttctggaactatatttggagcctctcctccatttgaaactattccatgtattctaacatctgattttacatgttgtcttagtgcatttatcccagcaaaagtaagttgtactgcatctagtgcattaactcccatatgagggtgactagctgcatgtgctgataccccttcaaaactaaactctaatgaatctattgccaaagccttacagtttatattattaaaagcttctatatgcatttgataacttacatcaacatcatcaaaagctcctgccttaactaaatcacattttcctcctgttgtttcttcagctggtgttcctattagtacaatttttcctttaaaattttcttttaacttacttaatactatacaagctcctagtgtagatgctgcaatccagttatgcccacaagcatgagctggttctttattgtctccatatccaggaagtgcatcatactcagctaaaaatgctatggtaggtccatcattatctcctaattcagctctaaaagcagtctccatattacaatatggataaactgtatcaaatccatattccttcattttctctactaagtattttgatgatatgtattcttcttcccctaattctggattgttaaatataaaattacaaacttcttcaatttcttttccaagttcattctctatctcataagctctcttctttatactctctatcataacttacctcccactagaatcctagatataatcctattgtcaaaaataccattacaagaattgttaatactaccattaaaggaattacgaatctaacccactttgaccaaggaatattggctactgctagtgctcccattaaaacacctgatgtaggtgttattaagttagttacacctataccaaattgataagctgtaactatcatttgtcttgatacatctactaagtcgccaagtggtgcaagtacaggtattgtaagtgatgcaagccctgatgctgatggtattaaaaatgctattaatccttctattaagaaagttaaatttataaatatagtttttggtaatccatttaataaatttgctgcagaatttaaaattgtatctattataaatccattttctgctattattacgattccacgtgcaaatgctatacataaccctgctgtaattaaatctcctgctccacttataaatgaattaactatctcatcttgtttaagccctgatgctattcctgatattatacctatagctgtaaatatcattgcaatttcagttatgtaccactctagtcttaaaactccatatatcataatcgccatacctattgtgaaaatggctattaccatggcttctctttttgtaaattcctttatatttgtatcactattaaccattgattcttgatttagtgatatatcgtgtactaaagattttttagggtcttttttaactttattggcatacatcataacaaatcctatagatatagccatatatattataaacataacaactctaaactctattccagaacctggtactatttgtgataatgcttgtgctattcctacagagaaaggattcgtagtagctgctccaaatccagctgttgctcctataaatactgtggccactgctgtcaatgaatcatatcccatactggtcataagtggaataaatatcatataaaaaggtagtgtctcttcactcattccaaacgtcgtcccacctagtccaaatagaatcattgaaatcggtattattaaaaattgaaacttcttcattttatttacagtatgagctataacagcttctatagcccctgttttattaactatcccaaaagctcctccaactattaaaacaaatccaactacttcagctgcatctataaatccgtttataggtgctgtaaatacatcagtaattccttgtggatttgatggtgctttttcataagttccagctacaacaactgaccttccgtctatatctactctttcaaaatttccacttggcactatccaagtaagaattgccattaacactattagcgaaaatattattgtaagtgtctgtggcatagtaaactttttcttttttaaactgctcatttttaatctccccactttttaaattaaatattttattattgcatccctttatcctattttgtatagatgtaaaaaagctcaacatggatacatgttgagctaaatgtgctaaatacaacatacctgcatcttccctttatcttgtttaagatagctctccatcaaaattcgggataattttgatgacagtactgtacctattaaatacagtcccagcactagctttggacactagcacttcggcacttactccttttatattgcctcattggtttccaacctcttcaatattaatcttagtaaatgcaacctctacctcaatctgttcgttagatgaggtaattcttattaatttttattgattcaaagtaattgtagcataatatgtcgagattgtaaatattttcagtataataattcttactttatgatgtcattccatttttcacaaataattttttctccatataatttaaatactgtagtatattttaaatacacacaaactttccacaaatttttaattattataatacctttataataaaaaataaaagccatgtaaacttatcaatttacacagctttatatacattaatctactccaagtacagctttaagctttgatgctattgtaataactcgtggaccaaatataacttgaactgagtttttctttttaacaactccacttgcacccaattcatttacccagaaaccatcttcatagaatccatcaattgaatttagctctaccctaagtctagttgcacagtttgtaacattttttatattattacttcctcctaaaccttctattatagaatgtacaagctttgtatctttatcatctacttcctcttctactgcattgttgtatgctgttttaccagcatctacagattgtctttctctatattctttcttactataaagcttaacttcttctgaacttcttcctggtgtttttatatcaaacttcttaattgcccatgtaaatattatataagtaactataaaaaatattggtatcaaaaataataatggtaacgcatccactttttgtggttgtaataaattaggaaacatatttctaaatgattctcccattatagaaacattaaacatttctgtaaatacatacgtcaatcctgccagtggtacatatgctacaaaatacaataatggtgcaacaaataggaatgtatactctattggttccgttacccctaccaacatggctgttactattgctggtatcaatatacttattgcttttttcttattagcattatcagccaacttatacatagctaaagctgctgctggtaatattgcaaaatgtattaataaacgacctgttgtgaagttacgagttatataagatagtgtatctgggtctcccatttgagctaatcttatattattaacaccctcgtaaattgctccacctacttccattgttccacctactcttgtatattctatagggaatgcaattaagtgatgtataccaaatggtaataatgctttatccattgctccaaaagtaaatgttcctaataatccactagaacctatccaattaccaagtttagataatgccaaccctactggtggccatataaagtacattgctgtacccaatactattgatgctataaacatcataatcattgaaaatcttggacctgagaaaaaagataatgcactaggaagttctatgtcaacaaatttgttatgtactgcactagctacaaatccagctattatagctccaaatatactacaatcatatgaaaagattcctaagaaagaaccatataaagaacttcgactatatgcttctgcctctcctaatccagatgccataaacgcttctgctgtaactgtatctgaatttataccatttgatgctaacaatgtacttataactgtgtgcattcctataaataaaacaattcctcctaatgcaccccatcctttttcctttttagataatccaaaagctatacctgtaacaaagaatattggtaagtatctcattaccataaatcctaaatcgtttattactttaaagaatacatttataaatgacccttcttttattagtccgctaagccctaatgcagaaacgttttccatatttgcaaaagctgaccctaatcctataaatactcctgctacaacaagtaatataacaggtatcatcattgctccagaaagtacttgtaatttatccttcatagtattatttcctccatttttattgaaatgccaggctatataatgcatatatatatacttctattgctttgtataatgtatctatacttatattttcatttgcctgatgtgaatttggattatctccctctattgtgggtccaaatgcaactccattttttaacactcttgcataagatgcagctccttttgtaaaaagttcggcttcttttccaaaaccttgtttatatgcacttgataatttatttattaattcactatctggttttacatacagtaattttaaatccttatatatatcaactattaaattttcttttttcccaatttcattaattctattagttataaactcccaacttatacccttaggatatctaaagtctattttcatattcaattcatttttctctaagaagatactcattatacatattgtagaaactcccatatctacatcttctttatatatccctaatttttttccatgattatcatctgtaaagtatgaatttaaaatatcccttattataacgcctttatcatttagctttttaattttctctaaatcttttgctaaactaaatgcacagttatatgacctgtgtggatttctcgataaagccctttctcctgtatatcttactaatactttaccttcttctagttcttctatctctgtataataagctaatgattctactaaatctttcttatcatcagttttaaaaacagcctcaattttgtcacatacaaatccatcttctttgtttgactttatatcaactaaattgtgatttctaaatttatctttatctattttctttcttagattgaagtataaaataccattttctccatttactattgggaagtttccatctggagaaaatgcaaattttggctgttcattgacactaaagtaatgctccatacattcccaagtcgtctcttcagctccacccactatcaatctaatctttctcttcggcttttcattaagttctcttaagaaaagtaatgcatataaaatccctatcaaaggtcctttgttatcattaactcctctaccataaagatagttatctttttgacatactttaaaaggtttactcttccaaagttctttattatatattggcaccacatctatatgattaagcacccctactacttcttctccttctccatattctatatgaattgcatatccatcaaagtcttttacaacaaaatctttgtcttttgctatttgaataagcttatcgaaggcatttcttatttctatcccaaatggttgatttatatctgttgtactttcatctctaattgaaggtatttcaactaaacttctaatatcctttatgatattttcttgattggattttaaataatcaataattagttctttgtttactatcatcttaattatttatcacccctttatattaattttacaaagcatttcagttcatatctacattataaattttgaatattattttttcaatatttcaaatacttctctaaattaccataatgatacggtaaacaatcaacagattatgacaaaatcatactatacctattactaatattttaacttatctattacgtcttttttaatgtaattttattccaaaaatagatataaaaagatgtagccttagctacatctttttatatctattcaacttccattattatgctattaatatctacatttccaggttctatcctatcttttactgttctcttaacagaatcagcatcatccattataactacaggagttattatatttaaatcatttgacgttataaaatctaaatctacttccattattaaatctttagcttttaccttatctcctgcctttaccttaacatcaaacggctttccttctagtgacattgtctctaaacctacatgtattaatatatttgtattatcattactcttaatcattattgcatgctttgtatcaaatacattgactatttcaccatcaacaggagaatataacttaccttcatttggtattattgctactccatctcccatcatcttttgggcaaaaactgcatctggaacatcttctaagttcactaaatttcccttaaaagggctatatattttctcaatcttattttcttttttcttaaatatattaaacataacacactctccatattataaaattttatgataatatttttcttaaagcttttgctacaccatcatttacattagtatcagttacaaaatctgccatagattttacttcatctgtagcatttcccatagcaataccaagacctgcaaatttaatcatggatatatcattttcattatcacctatacaaataacttctttgctatctatacctaatatatcacaaaattttttaactgcaataccttttgaagtacctttactcataacttcaaaatttatctttccagaacttactacttctaaatcttcttgttttttaaattcttcctttgcttctctcaaagaatctacgttttctgagaaaagtatacattttaaaatttcattatcagctttttctaataaagtttcacaacttgcattttctattatttcaattctgtcttcttctttatttttactatttattaatctatatggatgttcttcacctatttcattgttggatataactattttacagcctttaaaatgtttgtttaaattatacttttcacctattgtatagattttctttatagcttctttgctcaaaaccttcttatactcatatcccattaatttaaaatatgtcccattagttgatataatatatatatcatcccctaaaacacttgtaaaatatttcatagcattataaggtcttcccgtaactaaggctaccttgatacccttttccatagcttcttttagtgctttaatattttcttctgatacttcaaatcctttccccatcaaagtaccatccatatcagtacaaattaatttatatcgcatttgtatcacatcctagtaagatttttctaatatttcaacaaggtcttctttctttccaaaaggtaaaaatcctaaaactggacagcttgttatttgttctaattgttcctttgttacattaaactcagacatttttgtcttaagtcccactctctttaaaaaactttctatttcatttcctaaagttttagctgcttcatcatcttccactttttctaattcttggtttagcattctcgctactttggcaaatttctctatattatccttatagaacttttctgcaaattttgggaacactatagccaaagcctcaccatgaggaatatgtgtaactcctcctattatttcacttagtggatgtggtgctgctgctccagcatttgccagtgaacttcctcctaatgtatctgctactgctaactttgttctgtattctatattatttttatcttccattactttaggtagatagttaatgactaattccatagatttttcagacattatctctgtaaagtcattagcatttggatttatataactttcaaatgcatgagtaaaagcatcaaatgctgttgatgcagtaattctctctggcagagttaacataagctctgggtcaactatacattcttttgagaaacaattttgatgaaatattgtatttttctcgcttcctctcgatattactgctgcttgtgtaacttggcttcctgttccagaagtagttgatacagctattaatggtaattctttttcacttaccttatcgtatattttaaatggatttgtatatgtactaaacatataatcccaatctattttttctaaaccaaaagtcaatgctaatacttttgcagtatctatacttgaacctcctccaacagctaaaacaacatctacagattcttttttagctaattcgaacccttcatttattaattctacagttgggtttggctctactctatcaaagtgtacaacttctatacctttttctattaaattcaatgtaactcttttatataacttgtctaatggctctacatttggagtagtaactaacaaacatttctttccatattttcctattattctaggtagttcacttaaagttccttgtccaaaatttattcttgatggttgataaaagttaatcatatttttcctcccttaaattattgacttcatattcaaattatacatatcataggatttttaaggcaataccttcactgttaactcttatttactaaagcttatggcaattattagacaataaatgttttattattaccatatcattatgtaaattttattaagtacccatgttataattttataatcaatcttattgtataattgacttaataataaaaatagagtatatacacttttttatgacaaatagcttaaaggagaattaaattatgaaatatttgatagacagtgctaatcttgatgaaattcaaaagtgtttaaagtatggatttaagggaataacagctaatccatctatgtatcttaaagagaaggtaaacttccatgaatttattgagacatgtactaatttaaatccagaaatattaactgctgaagtcattggaaataatttatacgaattaattaattcatgtgataagatattaaatataaataaaaacactataataaaaataaatttctctgaagttggcttagaacttataaacatattaaatagtaaaggtgtaaaaactgcatgtaccttgattttcaatgtaaatcaagcatcattagctataaatgcaggtgctgattacctattcccttttataggtagaaatgatgaaaatgggaatgatggtataaaaaaccttacagaaatatgtaaccttatatcaataaatggatataatactaaagttgttgcagcttctattaaaaatgtattccacttaactcaagcatctctttgtggatgtgattatgcagctgtaacatatgatttatttaaaaaagcttcttttaaccagcttacagtagatggtgccaatacttttgaaagagattggtccaaggttaataaatagtaactaagatttaggagggtttgcattgaacaaaagattattagatattgctgaattattactcaacagctcagactatattactgtagatactattgccgaagaattaaaagttagtaataaaactattcgtaatgaccttgttattttagatgaatggcttttagagtttaatttatccctagataaaaaaactggttcaggggttattattctaggtaatgaagatataaaacttaaagttattagagatatcaatgataaatcaaattgtatatatgcatactctcctgaagatagaaaaaggtatattctaagtaaattatttattaaaaattctaagtttaggattcgtgatatttgcaatgaactacatgttagtagagctactgttcataaagacttggtagttattcaaaattttttgcaaaactttaaagtgactctagttagaaaaaccaataatggagtatatttagagggaaaagagaaagatattcgaaaagcagtttttgaacttgctactgttaataaaagttatactgaacttaaagaaatattattctcgaactctaatgaatgcaaagataccccatcaacaaaaatatttaaggagctatttaactatgattttgagaaattatctcaaatcactctacacaccttacaagtagaaaaaagtaaccttagtgatgagtattatataaacttcttaatacatatagctatatgtattaagagaatttcaattaaaagatatattaacttatctgaaggtttttttagagaattattagaacatgaatactttgaaaaatcaaaaattttatgtgctaacctaagtgaagcttttgacgtagaatttattgatgaagaggtctgttatatacttcttcatatagaaggattacttaaatcaataaagaaaactactactcttgaacctcttaaaaatgaagaaattacagagtataatctatctgaagcaatagctgttcattggggaagtatactaaatttaaacttaaaggatgatttaatattaataaagtctcttgctaatcaccttaaatcagttctacacagaataaactatggatttactattacaaatcccatattaaatgatataaagagaacatttccttatacttataaggctgctaaagagtctaatactgttatcaaacagttgatgaattatgaagtcaatgatgacgaaataggatatcttgctttatatttaatatcagcaatagatagaagcaaatctcccctaaatactattttaatatgtcactgtagtgatggtgtatctaatttattagtccaaaagttaagttttgaatttaatcagattaatatagttaaatctatacctctatcttctatttcatttacgaactttgatgatgtggacttaatactaaccactgctcctgtagactttgaacataatgctgaactgataaatataaatgctcttttaagtaagaatgatatttccagacttagtacaattataaaaaaactatattctgaaaaaaataaaatattatcttataaataaacaaaaataggcttgtctcaacatagagataaacctatttttcattgtccaaatgataaaaatatatttgatttcatagaaaaagtgcctcatgaactaaaaaattcattttgagacaccttcattttttatatttaatctttttatttaagcttttatattttttaaacttttatattttttaaacttttatatttaaagtaaattttattatttttattgagcgcaagcattatttatattattaatttcttcagtattcttaccaaactttgtagttacaaatcctattgtttttattatgagtaataaggatatcaatgaatatatagatatcataaaattcttacttattattccagatgctactattataaatccatctagcataaataatataactggcaacttcagaaacttaattaccttattaataagcattgcaactaaatcagttccaccagtactacagccccttattattgctatccctatagcagttcctaccaataacccacctatcactcctgctactaatagattgtcagttatgtgagtttgtggtattacttttaagaataatggacccataagagttatatataatgtttttattccaaaacctttccctaaaaataataatcccattactaaaagtggcatagatattcctaatgatatattctcaacaggcattgataagaatgtgctaagtacgactgataatcctgttatccctcctggagctaatgtatgttctgcaaagaaaaaattaactgctaatgccattaaaaatgctgatattgttatcagtaaataatcttttatcatttcttttttcatttaataacctcctatgattatattgtttcagtataaaaaatcaattaaattagtctagcttcctgtagtttttcataaaattaatgcttccttaaaacattaagaaagcatctcttttatcatagtttattatcttattctaaaccaaactttgtagctgcttcatctatagcttttctacaattcttaacacctgctgttataccatctttatccttgaatattgctgaagataatattacaacgtctggattacattctattaatggctccatattgtctgctcttagtccaccatctattgctaattcacacttaggattcttttcgtctatcatttttctagctctttttactaaatcaacagcactctttctccatccccagttatcttttccatcagtttcatcaacaccatgaacgactatttgcaatctatctatatcatatatagcttcatcaacaaaacatagtggtgtgtaacatccaattgttaatcctactttcataccaaattctctacagtaatttattatgtatgcaagaggagcgcctaaaaaatgttctgctggtattatcaacaagttacatcctgctgctgctattttttctataaataatctatcacaatctcttgtgtatatatggcattctattggtttatctgtcactggtcttattgcttctattatttgatgaccacccataagttgcatattttttaagtcatgcatatctgctgcatctgaatgtacgtagtctacacctgcatccattgcttctttaactacggctgatatatgaccgtaatttacatgtgctaatcctgctgctatttttatgtgtttcatatttgtatacctccatattttactttaattagtattaaatattagtttttgatattttttaatccagtattacttttatttagcattacttttattgctgtatatatttcttttatgaacttattctgcttttgttaactgtgaacttattttgctttgtaaattaatattacactgatatattttttttcacaacactttgactactccttaaaagtacctttatattgtggtaaattatagacattaattgtatataaaaagttagttttttaccacattcttatggcatttattgtctatactaactcaattgatatagctagttcatttaatatataatcagactataaatataaatttactcgataaaaagtaccattcataacaatattaatgaaagggagatgtaaaatgagaaactgtattattgcccaatctggaggccctacagctgttatcaatgcttctgcagttggtatttatgaaaaaaatttagaaactaaatactttgataaagtatattttggtatcaatgggattgaaggtatattaaacaaaaatataatagattcagactccttaaacaaagataatgtattaaatttaaagcaaacaccttcgtctggtcttggttcttgtagatacaaactggctgattataaaataaattcttatgattatgatagagttataaatatactagatgaatatgaaatagatacattattttatataggcggaaatgattctatggacacagtgatgaaattttctcaatactgcaaaaacactacttgtaaaataaaatttatagggattcctaaaacaatagataatgatttattaggaactgacaactgtcctggatttggttctgctgcaaagcttatttctacactaataatggaaacatacttagatttttctatatacaaaaataatggtatatttatagtagaaaccatgggtagagatactggatggttagcagcttcttcttcactagctagacttaatgatactccacttgttgatttaatataccttccagaaattgatttctatgaagataagtttatagaagatgttagaaaaatatttaaagaaaaaaataaggcttatatagttgcatcagaaggtataagggataaatacgggaactttatatgcgaacaaaaaacttctgctcatgataaatttggtcattcccaattaggtggagtaagcaactatctaaagaatcttatagtatcatcatcaattacaacaagagtaaaaaccttagaacttggtgtaatacaaagatgtgctatgcatttagcttcagatactgatttaaaacaagcagctgaagttggtgcatatgggatagaactatctaaaaaaggatatacaggagttatggctatcattaatagaacatgcaataatccttataagtatgaagttagtcatactgatatttctaaaatagctaacaagacaaaatattttcctaaagagtggataaatgaagaatgtaattatataactgatgaagccctaaattatctatatccacttattcaaggtaaaccagatatcaaatataaaaatggactaccttatttttcaattatttactaggaaattattataatttgatatacactcaattctatcgctcttaaatacctaagtggctgttaaataaaattataaattgttatatgacagtcacttaatcgtttaattatttaactgtttagttttttaattttttaatcttttttaatactaatacgatttgttgtaataatatctcacacccattttcattttggatagattataattagttagacaataaatattttgtcatgatattattatatatagtgatacaaatagaaatacttttatcatgactagaaaaacaaagattacacaaaggatttaaaaatcaaacaacttcaattaaaataaatggttaaaataacttctaaatcaactacataaacaataaaagaacataaagtagttaaatctacaattataaaattagtaagactataataacttaaataaaattaaagttaacaaagactattaaagttagcaaatattcctctacctaaataattgctttttataaagagttatttattttaatttattttaattgaaatacgattttaactagaacaatagattaatgtaatatttaatataaaataattataataattgaaaaggaagtaatctatgatgaaaatagcagtcataacaaccgaatttttaaaagagtttgtagataattctataaaaaagttaaatattaatgcagaaattgaaatatatatctatagagatttttctcatgttggagatttatatttagaaatagaagataggtttgatggatttgcagttagtggccccatccccaaaaaagctattacaaaaaaggctggaactattaaaaaacctctagttgattaaaaaatagctacgcacacttgtgactttagtcatgagttagtagctaaaatagtcagcatatagggaaacctatatgtagagataggatagaacctatccaatactacttgaattgctggaaacccctaaagctaaccaaactaaaacataaggatgaaataaacctaagtgtgaaagttacgaaagtagaaaaaattggttagatggtataaggttaaatcctaagtactttaaaatgggcaatcagcaggtaagctccgaataggagaaacttcaacgactattcctcttgagggaagtacactacaagctattggtagtggaagtgggtagaccttaacggataatgccgaaggataagatatagtctgtgcttacatgaaagtgtaagaagttcataagagaactgcataggtagtagcgaacttatgtgaacgacaacctcaaaaatgataaaagttaagaatttacggttcttatatatgttatttaaaaataaatataaaaaaccttcaaaatacttgttttaagtaattgcatattttaatattatgataggtgatgaaaaatggaagttactcatggtagaggatatgcatataatatgtcaaatatagatctccagtattatggggagacatttttggaatcctagttatttcgttgctactgtatcagaaaatacagaggagcagataagaaaatatattaataatcagaaaaaacaagtaaagtgaggtgatagtagtggaaaaagcttataagtttagaatgtatccaaataaaaaacagcaagagttaattaacaaaacttttggatgttgtagatttgtatataataagtatcttgctaaaagaatagaagtttataaaaacgataaagaaacttttacttataaacagtgtagttctgatttaaccaatttaaaaaaagaattaaagtggcttaaggaacctgacaaattttcactacaaaacgccttaagagatttagataatgcatataaaaaattctttaaagaaaaagtaggatttcctaaatttaaatcaaagaaaattaatagattttcatataaaactaactttacaaatggaaacattatgtattgtggtcaacatataaaactacctaaacttggtatggttaaggtaagggataaacaagtacctaaaggtagaatacttaatgctactatatctaaagaaccaagtggtagatattatgtatcattatgctgtactgatgtagatattggagtatttgaaaatactaataatcagataggtttagatttaggaattaaagaattttgtatctcaagttgtggagaatttatagaaaatcctaagtatcttaagaagtcattaaacaaacttgctaaattacaaagagaattatcgagaaaaacaatcggtagtttaaatagaaataaagcaagattaaaagttgcgagacttcaagaacatatagctaatcaaagaaatgattttctacaaaaattatctactaaattaataaaagagaatgatattatttgcatagaagatttacaagtaaagaatatgattaaaaatcgtagactatctcgcttaatttctgatgtatcatggtcagagtttattcgtcaattagaatacaaggctaattggcatggtagaaaaattgtaaaagtaggtaaattctttgcaagttcacaaatatgcaataaatgtgggtataaaaacgaggaagtgaaggacttaaatataagagaatggatttgtcctagttgtaatgaaactcacgatagagatataaatgcaagtataaatatattaaaagaaggattaagactaataacaattcaaaataaataacttatgtaagaaccgtaggaactacggggatggcctgtgaagaattagtaagacatattttagtatgcaaaattctatgaagcaggaaccctgtgactttagtcatgggaggttcagtttggtactgacttacaaagttactatgatatgtttctaaagcttatctttaaatataatacattagatttttctagagcatactttgacttaacagactgggcagataatccaaaagatatatcatattatttatcaaatggcacatttggagacttaatggatagtattgatgaaaatgcatctaaaatgagtttatctgacatagcaaaacttgaaaaaaagattgcaaaaaaacatattaatctatggaatgaagggaaaatcgatttttctactactcgttttagtagtattgttcctatgttacaaaatgcaggagtaaactttcatttcatataccctgatatagatttattaaaaaatacttttaataacttaataaaagatattcatttacatagaatgaagggaaatcaaccaagtgtaatatatataacagttaaagatacaaattatgatgactctactctagaccaagtttataaaatattaaatagtattaaaaaagataaattaaccgattttataattgaaaaaaatagtaattcttttaaaattttcactaaatgtgaaacgattaaatcattaactaaaaattttactgcatgttatataaaagaatctattgaaaatagtacaaatattaaagtatgtgttggatatggaattggtaatgatataaagcaagctatgtctagtgccataagtgctaataaggaatctaaaataaatcctttaaattacagtttcttagtcaacgaaaattatgagacaataggacctttactgtgtgataagttacttactgtttcaaataaagtaactccacatataaatacaattgccaaaagttctaaattgtctactcttactattcaaaagattatatctgttactgaaattctacaaagagatgaagttactcctaaggaattatcttcatgtttaaatgtaacagttagaactgctaatagatttctaagtagtctcttaaagtctggaaacgctactatattatatgaaaaacaaaactcaacaaaaggtagacctgaaagggtatacaaattatttatatcagaaaataaatattaaaatccaaaatgcataaaaatattttatcatctaatattaagtaaaattatatatgactttctaaaaggtatatctttgcatctttttaagatataccttttatgatatttaataatattttatgttattatctactaaaattattttctaaccattttactgcacaatgagcaaataaagctgaaccataaactaatccctcttcattaaaaattgctttaggattatgcataccaaaattatatccctgactaatacttcccattccaatccataaaaatactcctggaacccttagtaaaatctctgaaaaatcttctgaacccattgcagatggaaagtctattacattctcatttcctataatttctttaacataagatacaatctcatctcctacatccaaatcatttataactgcgggagtccccattttaaattccactttagcatttcctccaaatgatttagctattcctgtagatatttcaataattctattttttaatttttctctaacaaattggtcaaatgttcttaaagttcctgacatagatgctttatttggtatagcatttggtacgtttcctgcattaaacataccaatagttaaaactacaggctctttctgaggtttttctcttgaaagtatagtgtttaatgctatttgtatatgcgacattatgtttattgggtccactccaaattcagggcttgctccatgagttgcttttccttctactgttatttcaaatatatccgcagatgccatagctggaccacgtgaataagctacttgacctgtgttaagaaatttacccaccatactgtgaaatgccatagctgcatcgacctgaggattttctaatataccatcatcaatcattgattttgcacctctggtactctcttcatctggttcaaatacaaactttactctacctttaagtaagtgcttattatccataagtattttagctgctcctaagagcattgctgtgtgattatcgtgtccacaactatgagatgcatctttattcttacttttaaaaggtaaatccgtctcctccataataggaagtgcatccatatctgcccttaataataaggtctttccaccattttcactgtctaaaacagctactattccattattagacgtcaatttcggagaatatcccattttttctaaagtactggtaacaaaggttactgttttcggtagattgcaaccaatttcgggattttcatgtaaatatcttctccatctaataatttccccttctattgactgcgcttctttaaaaaaatttttcatattccttcctcctaatcagatagtcagcaaaatctcactttcttttagtaatgaaatgatgctgatataaaaattataattttatatattaaacttcatgtctttttaaggagttggaatatcatctggaataggacatttatatgttttaccattcatagatttatcaaactcttcttttgcctttttagctatctctggattatttaatattttggctccaaacatagccatgatttttgatgcatatatcatacctttttctcctatagaacttcctgcacaagatgtaaactgccagctatgacctggtgcacctagattcgtacaccctgtaaaaaagtatgctgtcggaactatatgcattacatctccaatatcagtagaaccataactattaaagtttgtaacatttcctccaccataatatagatgagttccttctggcaaattatatttacttatcatagccttatattgttgtgggctttgtctatctaattcagctgcaaaatccaattcctctcgagtccaaggctcttgtttaatctcattcatacattctgatacaagatttgctaaaacatgattatttaaagtattataacaacctcctaaaaactctacttcaacttcagtttcagtcatcattgcagctccttttgctacctttacaagtctttcatatgtactttctacagcttctctacttaaagctcttgtataataccatactgatgctttatcaggaactatgttgggtgctactcctccatctgtaattgtataatgaatccttacatcagaagtaacatgttctctcaaataattagctcccacattagtaagttccacagcatctagtgcacttcttccattttgagggtctgagcctgcatgtgcagtctttcccttaaagtgaaattttacagagttaacagctgttgaagtaccaattgtagcttcactaattttatttggatgaaaatttatagctaagtctaacccttcaaatgctccacctctagccataaatcctttacctgttaattgttcttctcctggacatgcataaaatactatagtcccacttaagttattttctagcatctctcttttaagtcctactactgcccctacatgtgctgtacataataaattatgcccacatccatgaccatatgcactcaattcaaatgcttcttgctttgttgaaactttttgatttaaaccaggtaatgcatcaaattctcccataaaacctataactggtttacctgaaccaaaactagctctaatagccgtggctaaacctcctacacctacttccacatcaaatccttcacttcttagaaagtttgctgtattttcacatgctttaaattctttaaatgctttttctgggttttcccatattttcttacttaaatcatcaagtttgaatctttttttatctatctcatttatagatatacttcctatcatttcttattcctcctataagtatatttactatcaaccaaatataattggacctattatactagcaaatgccactgatgcaatggttacagtaacaaatcctcctataatcatctttggtaataaataatctgttgccctttgtttttcttcttcagttccttccatagcatcaataccttcgttggaaattatctgtgttgcaggataagctagcatacaagttacaccaattgcagctgacattcttggagaatatcccaatagttttcctacaattgcagtaaataatattataaatacagaacctacaacaagtattcctatagttggaacaatcatcccaaacaatgctgttggagttaccttagcaagtcctccaggtaacatcaacatacaaccaaacattataattccattagattgagatttatctaaaattcctttttctaaaaaacctattcgtgtaaaaatcaaccctactaacaaacatgctatattaggatttaaataatagtttgcaggggtaaatcctggtattaaagtagccaatcctacaaaattaccaatcatagcaacaaatgaaagctttgcaagatacactagagtagatgattttttacctaaatcttctttaaaaattctcatacttggaagtctaaaattactttttgactcatctttcaaaaaatccccgttatctcttttaaattttaattctttatttatacaatatgtagttatcggaatgccaaagaacttttgaaatgataatactagaattacaaatgcagcaagttcaggtctatttgcagcttctgcaacagttgttacgataataccggcaacagtagaacctgctattggaggtgctgctattaaagcatactctctaccaaataacatactacccactgttaaacagccaacccctattcctacaatacctactaatgcaattacaaccgttttccattcatgacataagtcttcaagatttataagtgttcctaagttagttattaataaagctataccaaagttgctcattgcagctaatatccctgatgctcctgtaatgtcttttggtaaaacatttgtccaaaatcctagtaaaaatataatacatacaaataacaatgttgaaattgcaccttttgttttcttagataaaaactcactaaaagcataaatcattacacatacagtaaagcaagtaagtggattccaaaaattttccattgttgtttcctcctaaatataataattttttatcaataaaacaataattataaaatgtatattatgcagttattcttaactacatatggtatagcttgatattttttgatgatattatatacgtcttaaattattcctaaaatatctaaataaatataactagagttaactctctaaatattaactataattatcaacttactagatttctttttgatttttactttctacataattttacaagttagaattgtacttcaactactttctatcttagtatacatgttggaagacttatatttatttaaatattagatatagaatacatttttacaaacgtcttaaattattcttaaaatatctaaaacgaaataataatataaccattaaaccaatattatcagaatatactccactttaagtcttctttatataaaaattttatctactagtgcatcccctcctttgtaaattagactatttctaagcgaatttagatatcttattcctatgaactattactagaaacaaaaattatttattatattaaatcaatgataagcatactttaaaattctttctatacaagtatgatttatcatataatgacatctataccttcatctttatagtagtcctaaattattcttaaattgacaataaaaataatttcactatttgtaaaaatacttgtttttatattgtcaaactattctcaatatagattataatttcaaatcttttttttgtcaatatattctgacatttttctagaaaatttataaagttatatagtgagtaaatcatactatttttatataatgagtaaattatactatgaatatgtctaaatatttacttaagtataaacataaaaaatgtgtattctcctttttatagtaattttagttgccattacttttaataagaatacacactttactttaaagaccctatactctattttaaatgctttactagacactaattaacattagttcctaacttctatttatcttattactaccctactactatatccgtagaaaaatctaaaacttctccattagattttattacttctttgtaccaatcaaatgattttttcttatatctcttaaaacttcctttgccttcatcatctaagtcaacatatataaatccatatctcttactcatctgacctgtagttgcactgactaaatcaattggtccccacatcaaatatccaaaacattcaacattatcctcttcaattgcagacttcatttgagatagatgcttacttaaatattcaattctataatcatcatttatagttccatcttcttcgattttatcatatgcccctaaaccattttctgtaattaagataggtaattgatactttctgtaaatatagttcaaggtaaatcttaaacctatagggtctattgcccatccccacttactttgttccaaatatggattttgaatcccaccaaataaagatttatcacctgataaattttcttttggagtagatacacttgaaaaataataattaagacctataaaatctaacttaccttctttaaatgcttttttgtcttcatcagtcacttcaatagttatattatttttttcatattcttttaatttatattggggaaacttcccattgcacattgcatcaatttgataataatcacgatcattatctaaaaatgcatttaacacattactaggattacaattgtatggataaattggatttagtccaaatacacatccaactttattgttgggattgatttctctagccaactttgcaacctttacacccgccaaagtcatattataccctacatttgccaatgtttgaaccttattttctatttcactatacttaatacctgctatcatataagtaaaaatatccgagtgctctgtttgagggtcaatatggttcatctcattaaatgtaatccagtactttactttatcatcaaaccttcttattacagtctcactgtactttaaatacaaatccataagttttctgttattccatgaaccatatttatgtactaaattcataggtaattcaaaatgatatagtgttacaataggttctatattattttctattaatgtatctatcagaccttcatagtatttaatccctaattcattaggattttcatcatctccatttggaaaaattcttgaccaatctatagatattcttaatgcactaaatcccatttctttaaataaagctatatcttctttatatctattataaaaatctattccattatgagatggataatccaatttttcttctattttatcagtaattactcttggcgtttcataagagcccttagttacaaaatccataattgcaggtcctttgttatcactatcccatgaaccttcacattgatgggctgcaatacttcctccccagaaaaatgtatctttaatattcatgaattttccctcctaaaatttatactattacagttaataattcttctgattcatcatttgatgagattacatctaaataatcgctagtatttgtaactacagttattatagtagaatcaaagccttcctctataattttatcagattcaaatactgctaaagcatctccttttttaaccctttgattttgtgttacaagactttcaaagaattttccatctaagtttacagtatctataccaatatgaattaatatttctaatccttcatcagtcactataccatatgcatgtttagttggaaatactatagttatagttccatctacaggagatataacagttgattttgattcactaggtataactccaacccctttacctaatgctccagaggaaaatgctttgtcattaacttccccaagtgcaattacctgaccttttgcaacatttccaatactaatagttcttgaattgttctcgttgattattagttctaattctttttcattatcacccttaacttcttctttttcatctgaaggtattcctagtaaataggaagctgctgttgctgctacaaatgatactactacacttattatcataaatgtaaagttagatgcctctcctccaacaagatatgttggtaatgcagctaatccccaaaccattccatatgttttaacttgagctaaacctgctattaaaccacctatacctccacctatcattactgctacaaatggtcttctatatttcataaacacaccaaacactgaaggctctgtaactcccataagtgcactaaaacttactgtcccaaataattgtttttgttctttattcctagtttttaagaaatatccaaacattgcaccacaaactgcaatatcagatattgttgcagcgcccataaaaattgggtcataccccaatgttgtcacagaatttaaagatataggcatagtaaagtttgctgcaccaaaaactattaagagtggttgtaaagctgcatacagtgcaacaacactccaattacccaatgtatcaattaaaaacatacatgcatagtttaatccatcaccaatccacataccaataggtccaaatacagttaatgtaactgatagggttattattaaagataacactggaactaaaaaatagtgtagtgctttaggtaatatttttttcaaaccttcaattataattcccattgcccatactcctaaaagtattggaataaaactgtttgcataagttgtagcctgtaaatttataccaaataaacttaatccttctacaccatctattgatgacgataataacgtaactgctaacactactgctatatagggatttacattaagtctttttgctgatgctattgcaattaatactggtaagaagtgaaatgtagcacttcttaatgtatctaatatttgatatgtagggctatcactctgaagtatgccagacatatttaaaagtgctaatatacttgcgagtataccagctgcaagtagtacttcaattactgaagtcatagtctctgagactaccacaaagatggaattaaatatacctttgatacctctaattcccttttttctttcactttttatacttgattcacttgaacttaaacctatcatagacataaactcgttatatacatctacaacatgagtacctattataatttgataagcaacatcattagaaactacatcaattactccttttaattttttaatttcttctgtttgagcgatacttctatcatttaaagtaagtcttaaacgagtaacacaatgcgctaccgactttatattttcttttccccctataagttttattatattttcatttaaatctttatatttcatctgattttgcctccagtctttgagtcaccctatttatatgcaacattaaataagtttcttcacttatagatatatcgacattaaattgtgattttatatattttcttatcttttgaacacttccaaatgactttggataaagttgacttacttgtttatataaatctatagaattatcttcatctattgaagcttcatctgacataattctttggataaagtactgtagatgagtagtaaatctcatataatttgttgaagtttcatctagctctacattaaaatgatattttattatagaaactatatctgctaaagttctcaactctacaattgtactatcatgagactctttatttacctccatatttacaaaatgaagtgctattgatactgcctcatcatcaggaagattaattcccttactatcaccaattaattttagtgcatgcattccaatttcaaaatgctttggataaaatcttttaacattccataccaaaggactttttataaattgattcttttcacatcttttaagtaaaaactctaaatggtctagtaaggttaagcttagataatcacttgactttatatttaaagctttctcaccatattcaattatttcattaataagaactatattattggagtctgagttttgtagtagataactaaagtgttctagcatatcgtatgaatctagtatatatgttctctctatttcattttcatttattacttgtcccactctttttttaaagccaattcctttaacaaatacaataatttcatttttacctctttttactaaggctacattattatttaaaatctgaattattttcatatattcctcctttcaataaaaagaactcaagcatatatgtatagagtatccctctatttttcacatatatacttgagttctgcctgctaatcagtaacatactcaaaattatgactacgtcgccataattaaaattcttttttgtttaatttcatattctatatgttatactatccatataaatctgtcaacggtttcctagatatttttttattctataactacaagctctgttatgcgattatctggcaaagtttatatactaaattgatactattttactgtcactaatatttacaatattgtctgaaccattatctattttactattatgaattatcatagtaatgattttaaatataatgaactgtatgttaataaataaattcttaagtttagttttatttaatcactattaagatatattaataggtaaagcttcaaatttagttttatttaaatgctattaagatatactaatatataaatacttaaatttagttttatttaaacactagtaagatatactaatatataaatacttaaatttaattttatttaaacactagtaagatatactaatatataaatacttaaatttaattttgtttaaacactagtaagatatactaatatataaatacttaaatttagttttatttaaacactctagtgatatttttaaataaattttaataaaaatcattctattttgtcataaatcatttatctggcttatatttaagatatattggtggatactttacactttttaattcctcattacttcttaaaagtttattattattttccacatcataaatttgtaacattactttatttacatatagagcatgataattatcactataaaaatattgatactcatatcgagggtcatctttgtaatacactttgtatagtattccttcgtaacttgccttcttggctttttcttttgtaatactttttatattatcttttgaaatatcttgttttaccatatacttatcaatatatgtttcagcatctttccatggtttaatgcagtttttatatacaacaaaccctgttacacttataatacctataattaatactataaaaataactttatattttttcatattaatcctccttcatttattatttaaaacttgatataacgcactaaaaaaaggatgttatcttttttattaaaatataacatccctcatatttagcatcaatatatatgccccaactggtaggttaaaagaccccactgtcagtactttgattaaattgcatgtatgtatatatatttttaacaaatctattatatgtcaacttgtctactattacatataatctgtaatattacatctgctgctttttttgagcctcctgcattataaaagctttttgatagtttagttgcattttctttatattcattgtcatttataacttgaaatactgcttttttaatactttcggacttatcctcttttaacataattcctgctcccaaatgaacaactctcttagctaccattctctgctccgaatgttgaggaaataataccatgggtactccataatataaactttcattaacactattcatcccagaatgagtaataaacacatcagttttttgaagtatagcaatctgttcaacactatttttaacctcaaaattatttggtatatttcctaaacttttaatatcagtacttctaccaacagacataatcacatcaacatcagaatctttaaatgcatttatacagtttttataaaagctaacatttttattattaattgtaccaagcgaaatatatattaactttctttttctctctttaggtttaataatcaactttgatactgatggacctacaaatgaatacttactagagaaggtttctaccattggttgaaattcttttgatgtatatacaatggtatccgtatcattatcattagaaactatagaaataaaattttttacttcatacccttttctttgtaaaagctttatttttttattaatgcgtcttacaccaaaaatcatacgtataatttctataaagttttgtttcatcaactttgctgtatgtttattaaatgcaaaagttgttgtagagcatacatatggaatattaagtttttgtgcaaataactttccccaaaaacttaatgaatctgatacaatgcaatctggattaaaatctttaagttccctacaaactttttcatctaaagaaatagtagtatctactatcatctcaattaatccaggaaaatccttaccaatttttttctcatctccagggagtaattctggaaggtatttatcacaacaaataaattttgctccagcaccttcaattttatctttaaattcattaaaagaataatacaatacctcatttcctctatccactaattcacgaactacttcaatagtaggattagtatgaccatatgcaagaatgctaaaaaatactattttactcacatttcatacctccttttataattttttaaaatcattcttctttacgtactactcccatatgacctataaaatttatcaaatcacgttgatgaacaattcctaatcctctttcctcatctccaagtaccaataatttatctcctgcatttatattaaatacttctcttgcttcttttggaatgacaatctgaccacgttcaccaactactactgctccaaagaaaaactttcctttaggaggtactataatacctgttttttcttccgaatgattaactaagtcatctagtttgaccttgtacaattttgcaagtttaatgcaactacctatatcaggaatagattctccagtttcccttagttaaagatatgaaccctctttatcagtctacttttccaataaatcggtaatatatctctatttcctgtattctttcgttatcctcattcgttattgcttcatgaataaggattttttctatcattgcatttaataacggtgctgtcagttcctttggtacggaatactccttgattaactcaatccacttttcagcacctatcatatcctgttccattttacttaattcttctcttaggttggttatctgctgttccagttctatttgttctttttggtacttgctagacaacatcacaaaatttcgctctgttatcttctcacaggctctatcttcatacattttcgcaaacaaacggtcaatttcattttgtcggttctcggctttcttaaaggcacttgcctttttcttcttttcccgtattcgctctgcattgcctgctttctgtatcttgttcagcaccttttcttcgtcctgctgtactgccttagcccaatactgcaatcgtttcaatacggcttgatacaacacatcataacggatatagtgcatagaacaagtacctttgccaaactgcccgtagtaactgcaagcataataactgtaaggcgttttatttgccgtattcgttgcaaaccgcatagaccagccacaatccgcacacttgacaagccctgcaaatatcggtgttgctttttcctttgtctgtctacgtcttgattttatctgttcctgcacacgatagaacacttctttgtcaataatcggttcatgggtattttccactcgaaaccattcactttcgggcttacgcactttcttcttgctcttgaatgaaaccgtagactgcatattgtgaacgctgttgcctatataaacctcactttttaagattgccttgacatgagcaatcgtccactcataacgtttgctttcgggctttccctcaaagatatgtgcaaaagtaccgtaccttgtaaaattcagccaagacgctgtcggaactttttcctctcgcagtacctttgtgattttggcactaccataaccttgataggctagggaaaagattttttcaacaatccattttgtttcatcatcaaccagcagttttcctttgatgtcagggtgtttcttatatcctaatggagcataagcaccataatgagcaccctctgcaaatttcgtcttaaatgccgatttcactttacggcttgtatctcttgccacccattcattgatgatgttcttaaatggtgcaatctcactttcgcctttctcgctgtctacaccgtcgtcaatcgctatgtaacggacattatggctgggaaaatacaattctgtatattgtcctgtcataatatagttcctgccaagtcgggaaaggtctttcgttacaacacagttgatttttcctgcctctatatcctcaatcattctttgaaaactcggtctttcaaaatttgttcccgaccagccgtcatcaatatattcatcaatcacattcaaatgatgttcttttgcatatagacgcaacatacttctttgtgtggtaatgctggaactttcgccctgtaattcatcatctcggcttaacctaagataaagtgcagtattgtaaatctgttgtttcattgtcagttatcctcctttataactaacccgtgtttacaatacctgcttgcaagtaaagtataacacgggtactttttgccattcaatctatgtcttacaactgcaccaattttatgcgattgtctgctttgctttttccagcataacatcagtcagaagttcctccattgtctttcccttttcggaaaaatgctcttttacaacaatctttgtttttcctctgttgccaatgctacgcttattatttgtcttttcttgcattgtttttacaatatcagcaataacacataccccctttccataatcttttttctaagcaattcaacggcatttgtcatagcccacaggaattccacctctgcatagttcttatgtagccgtacccattgcgtgcgacgctctgaacgttcaagctgtggctgtacgggagtatcatttatcagacagaacaggtcatggcgataaaagaggacaagtcttttacaggaacacaaatagggttcgctcgcttttgcagggaaaaggtcatggcgtatctgcttcaatggatcgctgtctgtcaaacgtattgaattgctttattcagttgtcaaagaacatgaaagaagaaaatcgtctttcctatataccgcgttggaaaagagccgaagcgtaaccaatattcaaaactttttctcttttcactacatatctgtacagcaaacgtccagttgctaagttgaaatgaaaatagttaaactctcttttcctgcaccatatagggaaagcaagtatcagtttgctaagttggtgatgaaaaaaatctgtttttcttttcacaccctaactacccatgcaacaccgtaactgccaactatggaataaaagattttctttgctccatatagggaatgaaaactgtcaaatgttaagttgaaattaaaaatcgtttcttctttcacatcatatagggacagcagccaccgatttaatgacctgttttcaaaaaaagttagatttcctttcctcgcaccatatctgtacacaagcagtcattttgttgcagtttttttgaagaaattaaaaaataccgtcattcccttgtggaacagcggtatctttctcaatcatatctgctatgtctgttgtcatttgtttaatctttaattactgcttttctgttagccttgtatgcctgtcgatttcttccagataatttgctcctgttttcttttcaatctcttttatcatcaataaagagggcatgacctgtctttctagccagcgttttattttatccatattaacagcaacaggtgtcataataaacggaagtgaggtcgttacattatctaaaaatatatcccataaaatataatcgggaaaatctatctgtgtgagaataaagcttgctatggtctgttcgggatttcttgaaaaaacaagttgctctaccgtttgtcctgcttttccattttttaaacgaatttcgaagcggttcttaatatctgtttttatacccttgcttttttgttccttttctttttcatacaagcaaaagtagatagaactattctttgaaccgatataaaaagtttttgcagtatctccatgtgtacccgataattttccgctgtctactgcttcatgggttcttgaacgtttccataccttgttagcataataacgttcccttagaatttctatatccagcaatccgcccatatcattgactgctaaatctatgcgtttaaaaacaccttgataatctatacaacatcttaaaaagcaataccagtctatccctcttacctgtaaaacatattctaagtcccgacaccccatacctcttaattccaataaaacacccatagaactatctttagaagcatttacactaatatccccatagatatactgttcttcataagcatacattccgtaatcttcatgtataaaatattcgcttttcattgccagcacattttttataatttccaatgcgtctgtggtaggaaaacgaacacgcagatagtcaatcgttaaagtgaaaggctgtgtacaattacaataatcaagataatgtaagagtatatgtttcatttctttactggcttttgtttttccgttttcaatttcatttaagttctgcctgttgatttgtagttcctgtgccagtcgtgattgcgaataatcacagacatttctcttttgctttaatgtttcaataaatttcatatcattcatgcttcattcctccaatcaaaaaaaggcatatactcataggagcatacaccttgtatcttatatttattttctattgatatgctgttttagacctgtcgggtagaaagaatagggtgtaaagtgaaataagttcttacaaccttataaatcgttgcatatcagcagttttatatttgtttttgctcttgtcttttgtaatagtccccccctgttagataacgggggcttagaaagctcgcaggctcgccaaaccgccaaagtgaaccgccacctcgccagcaagctggcgtggcgatatgtcttacgaccgccaccgctggcggatcgcttcggcggttcgtgaaatttatattctatctataataatcttaaaatctgcctaaccaaaatgaaatggaactaacatattaagtataacagcaataacaactgcactcaatatcatatacgttgtctccctaaaggtgttacgttttaaagctattaatgcacaaccaaagactatcacttctaaaattgaatacacatcaaaataaatccaaccataaataaatgtaaaattaaataaaattgcaattattattactgaaagtataaaagatattttgcttttccccttagcataccaacaaataaaagctaacaatggagaaatgacagtaaaaccaagccaaatcattgcataattttttggaaaaaatccagcaacaaaatacgaatataggtaataacttgaaaccattccaatgaaaaatactaacacatttaatgatgctcttatggaagaatgactataaattgcaatgtacaaagcaatcaataaccatatagcaaaacgaccaaaaaaattactaatatctaaatattcaaatataaatggtaaagtattgcttgctgtagtatctaaaaattttgcaaaagttcctaaaactattccaaaacacagtataaatattgtatttataattttcctagtaatagatatttcattatctatacgccttatctgactcaaaaacttattcataatgcacctctaaattcaattttccctatcaaatgttaaatatcttgtgccttggaatgtcagctgtcctttatctccctctgcaagcactccatactctgagccagatacagacagctctattctatcaccactatctacttgaaatgtcacataatacgaggtgctggaaattgtatgaaatccatgtgctcctgatatatcaccagcgtttggttgattgttatgagtggtattctgacgttttgctactattcttgctgacacagttaagcgaggagaattattgtttttaaaccaagtagctattcctttcacaaaagtgaaaacaattattataaaaatcagtataaacattataggaaataacatttctattagattaaacaatctctttttcctccttaatgaaattctcctttaagtataccatgctcctttaagtattgtcatttcttttcttcatttaaaaagttacttatcagtctaaaataattaggaaaatgaaataatttactgtgttgcattaacgaaaaagagataccaacacatttatgtagtatctctggcttaatagcaatattcttttctctacaagcaggtaaacacaggttatttcagtaatatccttttgtttgggaaactccactttcccattttgctattgattgtctagaaacattaagtttttcagctaattcttcttgtgtatactggtggatttttcttagactttttaaattctcattaatcatatttttcatacctcctatgtttataatattggatttattatttaaattctatcaactaatcttaacattcatatatatatttatatacttttattatataaatttattgttcaggtaacatgtttccttaagttataatagataaaagcaaacacaaatctgtcaaccttcgctaaagtatttaagttagggtcatttacattgttaaatacttctacatcttaaaaagttttactcatcaatcaaatgaaaacttgcaataagaattaaaatcataataacaaaagtgctgtctcaaaataaagataatcttttttcattgttgaaatgataaaaatatatttaatttcatgtaaaaaagtgtctcatgaactaaaaagttcattttgagacactccttttttataataaaacaatactatctacgtctttttaactatatatctagcgcagcatgatgcccttggtatactgcatttgttattgtagatgcacgaacacagtctccaatttgagcaacatatggagcagaatcaagtaaagtgtctaccacttctcttcttggtttttgtccaagtgcacatattactgaggttcctggaatatttattttattcccagatttattcatacatactacaccttctgttgttacacttaaacccttatgttctgtatatacatatataccttgtctttctatttcttctaataatattggacgatgccttatatttgcatctggggcaagttctgctctcatctctactaagtgaacagtcttctcttcttgagctaagtgaattgcagcctcacatcctgctaatcctccacctaaaactattacttcgtcagtgactttttctttttctacgtaataatcattaactattactacattttctccatcaagaccctctattggtggaacaagaggttcagaccctactgctataattaatgcatcgacattttcattttcaacatattcttttgtaactgttgtatttaaacgtacttcaacacctaaatcttttgctatttttccaaaagtatttcctaattcatacattttatacttaaatggaagtgcttgttctccctttaaaattccacctaattcattagttttttcacaaagtattactttatgtccacgctttacagctgtaatggctgcttgcaatcctcctggtccaccacctgctattaatacttttttaggttttaatactgaaacaacttcagttccatctaattcacgtccaataagtggattaacagtgcagcgtcttgtagaagtggtagcacgttctgccatacaagtgaagcatcttaggcatttcactattttttcatcttgattactcataacttttcttggtaattcgtggtcagctagtaatgcacgagccatgtaaataacatctgcttttccactagcaattatctcttccatcatttctgggtcatttaatgctcctatagtagcaactggaatatttacatgttttttaatttcttctgcaagatatacgttacatccatgttctaagaacatagaaggatgtgttactgcaaaccctctttggtatgtacctgctgatacatgaagtaaatctactcttgattccaataatttagcaatttctgttccataatctaaatcataccctccctcaaataattcagaaccactcatcctaaactctattggaaatcctggacctactgctttacgaacactatctaaaacttctttagcaaaacgaactctgttttctaaagaaccaccatatttgtcagttcttttattaaagtaaggtgataagaattgattgattagccagccatgtccaccatgaatcataatcatctcaaaccctgctctcttagccaatgctgcaacatttccatatgactctactatttcagcaattatttcttctgtaagttcttttatctctaatccatcaggacgaacactaggacttactccccattgtgataatcctcgcttcttatctttgtcaactaaataagttcctgaatattgtcctgaatgagatagttctacacttggtattgctccatgacggcgaattgcatctgctgtataagtaaaacttgctaaggaatcaactatttttaagtctagatgatatgcatgtgaaccatctgtttctggatgaaccatacattcactaattgtaactgcacctgctccaccttttgctcttaattcgtaaaaggctgttgattttgagccaattgtacaatctgctgttatgtctgttccccccataggtgctgaaaacattctgtttttgaatgttacatttccaattttaattggcttacatagatttggatattttctttccattttttatatctccctttattaaattttctatctttaaattttgtattttatttatatatttatataaaaatgttaatataaaacctattaaagctataattatagctataatgaaagccctttgataattgccatctacagaatatacatttttcatcactgcaggtccaatatatcctgcaaaagcaaaaccaataaacatgattccataatttacactattatttttaggtccaaatttatctactgtaaatcctgggaaaattcccataaatgaaccaaaacatatacctataattattattccaatatagaatgttgctacatctccttctcttgagaataacaaacataataaaccaaaaattgaaataactaatgcacctgataaagtatttattctaccaattttatctgatatatatcctgcaacaatacggcctaatgtattaaacaaggctaaaattgaaaccactattgctgaatctgaacttgtcatcccaatcatatttgttgctagagaagatgctaatgacacacacattaatccatagaaagctccacaagttaatattataatcattagataaaatataggtgttgaaagcatttctttccaatttttattaataacaactcttacttttccttttttctctggtggtacccatccttctggtgtgaaatctgctggacattttttgataaagaaagaagaaacacatacaattataagaaatactaaacctattgatttaaatgcagaagttactccatatttattaattatccaattagcaactggaggcattattactgaactaaacccataagctgctgttgttataccaccaactaatccacttttatctggaaaaaatttaattgaattacttattgtacatccataaaccatgccaaccccaagacctgttattatcccatatgataaaatcaacataggcaatccttttgagaaacctgccaatatcatacctataccaaaaattaatcctcctacaaatacaacttttttaggaccaaatttatcatttatcattccccctgtaatcatagtaataggtccaactgagtttgtaactgtaaatacaattgctaaactagcagctgtaaaagttgttccagcaagactatttaaatgttctgccataggtgatgcaaatacactccacgcatatattgaaccaatacataaattgatgaaacaacttgcaattaatataatccatcttttttgtgttaaattcattactctcctcctcgataaatttattaaatagaatttcttagttaagattatcacaattttttctatatgtaaatataaacatgtaaatacttacatgtttatatttacataatttcatttttatatatagttttatttattttttgttcctcataatttaaaagttcttattaaaacatagctatattaattaattcaaactaaatatatcgtgttataataagtatgtaattaaagaaagaggtgtatttatgcgaactttaaagtatgcaattttaggattattaaatagaaatcctatgactggttatgatatcgtaaaggagttcaattttcaattagctgagttttggaatgcaaagcatagtcaaatatatcctgaactaaaaaaattggtaaatgaaaagcttattgtatatgatattaaaattagtggtgatgtattagagaaaaagttatacacaatcacagaaaaaggtaaagatgagttcttgaaatggcttgaaaaggatgagccaatggaaagaacccctaaggatatttttcgtcttagaatgtatttttctaataatttagatatagatactaggcttattttactagagcatcaattgcttcaacaccaagaaagaattacgttcttgtacagtcaaatggagcgttatagtgaagttcctcctcttgatagtaatgattttggtgattatatagttcttgatggagctattatcagggaacaaggtgctataaaatggctaacaaattgtattaaccatcataaaaatttggataatactactttgaaataataacttattgattttaatagtgtatttaattatagacattaaatttataaaaaagactgtacacaactttgtctttgtatacagtcttctatggttgattattcaagatagataattataatatttaaaacagttaatataaaagttaaatattttttattaagctatcaattttatcttcttattgcccttcaaaatcatctttatatttacaatctttcacatgaaaattactatctcttcttatataaaaatccagttgatattttgttactaaatttaatggtaatcaaattctttaccaatgaatataaaaattactaatgtgttataattttcttaactactaaattttacatacatttgaatagaatatttcaataaagtactataataaataaaaaattaagagttaaaataaaaaatagttagggagatattattatgattttatattttagcggtactggtaatagccgatatgtggctcgtaaaattgcacaagaattaaatgatgaactgatatcactaaatcaacttataaaagaggaaaaaacagatgaattaatatcagcaggtaaaccattcatattcgtatgtcctacttatgcatggagattgccaatagtggttacagattttataaaagaaacaaaatttctaggagacaacagagtttactttgtaatgacttgtgggggagatacagcaaaatccataaactatattcaaaaactatgtaaatacaaggaatggcaattaaaaggtatggcagaaattaaaatgccagagaattatatagctttattttctacaacagacaaagaaacatcaaaacaaatgattaaagaagcagataaacaaatatataggattatttctgatatacgcaatgaaaatgaatttgaaactattactcctagtggcttaggaggtacaattaaaagtggtataataaatacagttttttataagacaattattagtgccaaaggatttcattatactgataaatgcattggctgtggaaaatgtgtagagctatgtcctttaaataatattaatttaaaaaacaaaaagccagtttggaaaaatagctgtactcattgtatggcatgtatttgtggttgccccactgaagctattgagtataaaaataaaactcaaaacagagaaagatactatttagaataatatattcttaatatttaaaccattataaaatgaactatacccattgttttatacagttttacatattttaactgtctcctaagatgggtatagttcaaaagatagtgtctcaaagtgaactttttagttcctaaatcaatctttttgtattaaatcaagtataatttaatcaccttttcttatatcattttcactaatatgttgtattccaacaaatataagatttattagctctgttagtgacttccattgtgatttttttgaatcaagataataataatttttcgttccttctctacgcaaattaacaatctctgcttcttttaatatcttaagatgatgagatacagcaggacgagaaagatgtgttttttttgtgatttctcccactcgtataccattaaaatcactctctaagagagcaattaaaatcaattgtctagtctcatcacccatagcagagatagctttgcgacattctttaaatttagatgttatttcttgcattctttgttgacattctttttccataaaatccaccctctcttataagtatctaacagttgctacttctttctgtgcagtacgtctatatttaacatctgggtatccaattactaatgttgtaagaacatgattactgcgttttagacctaaaagcttttttaattttggcgaattatttgctacatctgaaaaatatccactaaataaaacacctagaccataagactctgccattaatgccatatttgatgctgcaagtgaaccactaatcttatcttttgtaattatcattattgcaataggagcatgcttaaagaaaaagttatcgtcaatctcaacttcttttgaatatttaatagctatatttgcaataggttttatttttctaaaaaatttcactgcttcgttttcataaattgactttttattgtctaaaacaatatatgatacatcttgtgaatttttagcactaggggtatacctacctgcctcaataatttgctttacaatttctgaagaaacttctttgtctttaaatttacgtatacttcttctagatttaattgccattagtaattcatctgaatctagctttggcttatttgtaagttctataggaggttcatcaaatcctgtcaaggtaatagcttttgtgggacatattgctgcacaatgtccacacattagacaatcttgttttttaattactgactttttattttctataattatattgtttactggacaatcatttttacaaagcccacatccaatgcaaagttctttgtcaacttctattatatgttggtatttcatattcattcatctacctttcgtttattagtttaaactattataacacgtagacattttttatattcattggtaaagaatttgattaccattaaatttttaatttctctattaaataaatttttcatagaattttaaagtatcatagtttatacataataaaaaagacaagcttaaaacctaagctcgcctttttcatcttttattacaaagtaaattgcacttacttcccatacttcttaacaattttattttctaaaattttatttgtgaatcatactattgcataaatacaatgtaaaataattctgtattgattttctatagttaaaaaagttaaaaattatacttattattaatttttatactcttcttatttaatacaaatttcttatttaacatagatttcttgtttaatataaatcttcaccatttgaagcaattactttcttataccattcaaaacttttctttttcattcttcttagacttccattaccactattatctctatctacatatataaatccataacgcttttccatttcacctgtaccagcacttactaaatcaataggtgcccatgtagtataacctaataaatcgaccccatctatagaaactgcatcatgcatagcttttatatgttctcttagataattaattctgtaatcatcttctacataaccattttcatcagctatatctttagcacctaatccattttctacaataaatagtggcttttcatatctatcatatacatgatttagtgtaattctcaaacctaatgggtcaattggccatccccattgactgtatgaaagatatggatttttagcagatgtaaatatgtttccttcagccatatcatctgcattttcatcagttctaacacaacggctattgtaatatgaaaatgaaataaaatctactgtatatttattcaataattcaatatcaccaggttccatttctggtgtaatacctttttgctccatatactttaacgcatagttaggatatttacctttagattgtacatccacaaagaagtaattttctctatctaactttgtagcttcccatacatcattaggattacaactataaggatatacacttccagctgcaaacatacatccaactaagttatttgaatcaacttcatgtgctattttagttgcaattgcactagctacaagctcatgatgagcagcttgatattttatcttttcaacatcttcaccttcttcaaagcaaataccagcacccataaatggagcatgtaaaatcatatttatttcattaaaggttagccagtacttcactaatcctctatatcttctaaagataacattgcataatttctcatagaaacctatcatttttcgattacgccatgcaccatactttttaactaaatgcattggacaatcaaagtgtgtaatagtgactaaaggctctattttatattttttacactccttaaatatattttcataaaattgaagtcccttttcatttggtgtttcttcatcaccttttggaaatattcgactccatgcaatgctcattctatatactttaaatcccatttcagcaaataactttatatcttctttataattatgatacatatcaataccagttttagctggataataatgctcatcatcaaaatcaaacatttttagtttccctgtaataactgctgttctatcttttcctgttggacatacatctacatttgccaatcctctttcgtcttcattgtatccaccttcacattgattggctgcagtagctcctccccataaaaaatcatccttaaaactcatagtcaaagcctccttaaattataaccaaagcactagcttatgctaatgcctcaatttttactaaaataagactgtaattagattatcttctaattcaatatttttactttctgtttctactacatctaaaaattgtgatgaatttgtaataacaattggagttacagtactataccccaactcttttattgcatcaacatcaaagtttaatatagtttgaccttttgtaattctatcaccttgttttatacatgcctcaaaacctctcccttctaattgaatagtatttaatccaatatgaataagcacttcaacacctgtatcagaaagaatccctatagcatgtagactaggaaataaggttgtaactacaccatctactggagcaactacttttccatcactaggtattattgccaccccttgacctagtacaccagatgcaaatgctgcatcctctatatcacttaattttaatacttcaccttttataggacttgctactatttctctttctaatttagtagacttgacttcttttatttcttctttccccttatttcttacttttttagactcttctactttctcatctttatataaaatcatagttaatacaaaagctacgaccattgatatagctataccagaaagagctactattaagttgcccattcccccatctggttcaatcattgctggaagttcaaatattcccatacctccagttataaattttctaagattaaagaatccgtagaaagcgcctccaatcccactagcaatacaacttattataaatggtttctttaaaggcaataatattccataaattgctggctctgtaactccaaatataccagatataaagtttggtattgtcatctcttttagttttttatctttagtcttgaaaaatattgccaacacaactgccgaacttgcaaatgtacaagcaaagaatggcatcataacattatcatatcctaaagtcataacattgtttatatatacaggaataaatccccagtgcataccaaaaataacaagaatttgccaagtaaaccctactatagcacctgccaatagtggactaaaatctcttattgaaattacaatttgtgaaataagtgtagaaccaaatgttgcgataggacctataactataagtgcaacaggcactgttattaataatgtaagcattggcacaaagaaaaacttaactaaatctggaacaaacttattaaataatttttcacacctagaagcaaaatacactataaatataattggtacgactgttccagtataatcaattgatacaattggtagtccaaagaaatcaatatatactggtgatgcaaacattgttcctttaaataaagtgtacatcacatctgctcctgctgatatactgctaccttgtatagcaggataacatactgcagctcctagtgctaatcccaacattggttttaatccaaacttcttagctgaagtatatcctaagaacaaaggaaggaatgtaaataatgcatctcctgctgcatttattaccatataaccaccagatacatcactatataatcccattgctacaaataatgcattaaatcctttcagcataccacaagctgccattattcctaacactggctgaaaaattcctgatattatatctatacctttatctagtatattacctgattttttagtttctgaacttgtacttgaatcatctaaaccaattatttcaactacatctttatagacagcttcaacatgatttcctataactacttgatattgtcctccacttttcattacagtaacaataccttccatgttttttaatacattgtcatttgctatactttcatcttttaaagtaaaacgtaatcttgtaatacagtgtactaatccactaatattttcttttccaccaacattgtttactatctcttgtgctaattgtttgtattttcccatttttctcctccatatttcgtttaaattaattttttgaaatttgaaggtttggccaactcaatgttaccatccaaccataggtataattttgttagtatcactcctttcaatcattcttaatatactactgaaaaattatttcacttacatatttgagtctttaactactttagctaaatgtattgttaaatatataagctcatcatctgttaatatgtagttatattgttttttaatgaaatttttaattttaactacacattcaaactctttattatatttagatttaataatgcttagtaattctttgtctgtctcaccttcatgtgcactatctaaaagcaatctttgcgcaaaaaactttaaatgcattataaatctataataaaacactgattcttcatgaaattctatcctaaaatgatacctaactatgctaagtacttcttgtattaacttcgtaatatcagatgccaaagtatgaccttcacttaactgagcattcactatatgaaaggctataaatccagcctcatcttctggtaattttatacctgttttgttttcaataatatctagtgctttcattccaatttcaaactcttctttataaaatcttttaatttcccaaagaattgcattttttacatttattccttctttcattctttgaattgcagaatatgtatggtcacttaaggatatgtaaatactttcatttagcttcttgtttaactttatttgtgcgtattctataatttcacttgataatttcatgtgttctataggaatattattgagtaattcttgtagtttgtttgatatttctttatttgatattctaaatactttatttactttagttttatctattagattgccttttgatttttgataaccaattcctttacccataacgataacttcttcatcattatcatctaatgtgattacaacattattgtttaatatcttattaattatcatgattatcctccttttaagcataaaaaaagcttatccataataatgggcatactccttcctaggatactgctattattaatgaataagcttagcttgtacttaaacaattactacctaattccaattaatatgataaaacatcagacatattttgtcaactttttatttccatatacttcatcaatcttttgtgttgctttttgtcagttataataattattatcattaatattaacttatttctttgcatcaatataaatacaaaacaagttatagtcaataataataaaaattctattaatgtaaatagttaatattatacttcctctactacattatctgtactttccttaacatttttttcaactccaaaaacatatgtcataataaatggagcaaccaatgctataaatataactataagtccatttactatatttgaaattcccttttcccctgataatccaagtactgccattatactattttgtggaacatataaagtcacatgagtaattcctgcaaataaccctgcgattcctgctcctatagatgctaacatagcaggttttttaagtttcaatgtaactccataaagagctggttcagttatacccatgatagctgatatccatgcagctgatgctaactgtttcatcttactatctttgcttcttaatgctacagctaatgtcgcgccaccttgcgctaaattagcacaaacttgagatattaatattagcgattcttgtcctgtagttgcaaatgctgatatgaatataggagtcaatgcatgatgcatccctgtcataacgataaatggcattgcagctgctaataaacaaaccattataaatcctaaccttccttgtagtaaatttattatactagctaatccctctcctaagaaatttcctattggtccaattactattaatgctattggcgcacttattaataatactaaagttggatttaaaattgtttttaacatgctaggtgttaatttattaatgaatttttctatatatgacatcatccatactgttaaaagtgcagggataacagatgctgcatatataacaccttgaattggtactcctataaatgatatagggtccccacttgatacccatgcagagaaatttggatgtaaaaacacacctactactataactgctattgatgtattaacattaaattttttagctgcatttattgcaagtattataggcataaagtaaaatgctacatctcctattatatctaatactctatatgtacttgaatttgatgatagccaattaaaagtggtacaaagagataatataacttttatcatcccagatgctgtaagggctggtatcataggtgtcatacaaccagttattgtatctattatattatttaaaatactattttttttattttcattttttatatcgcttttaatatctcctgtggtatttatccccttatttattattgcattaaatacaacacctacctcattacctattatgacctgatattgagttgaagttgagtttactccaactaccttatctatagattttaatttatctgcattgactttcttttcatcttttaagatgaaccttaatcgtgtcatacaatgagttaagtcaattatattatcctttcctccaagtccatcaattatcaattgagctacttcttcatatttattcttcataccttatcctctcttttaaaataatttttaatataattttaatccaaattaatctttttactccaagcttgtaatagtgtattgtaatttaataagctagtatcttctacaatatggtcacattttcctagtacttcttttttccccacaccaattgatgtcatattggcagcatttatagctttaatacctgaataagaatcttctattcctacacaatcatattgttttaaatttagcatcttgctcccttcaataaaaatatcaggatatggttttcccctttctaataaggatggatttactatacaatcaaattcatcttttattcccaaagattctaatatcctaggtgcattcttactagcagatgctattcccaatttcacattattttttttaagttcttttataagctcatttatccctggtaatatatctttatatgttaatgagtttattaactttatataaatgttatttttttcttcacacacctttaacttttcctctttagtataactatctactttattagcagataacaatattttatctaatgattcttccctgcttatgccttttaatttttcattaaaagtttcatctatttctatatctagcgattttgctatctcatgccaagcttcaaaatgatacttagcagtatctgttataactccatcaagatcaaataagactgctttcatattaattactccctttaaaacaattattaacttctattatgttctttgataattttatttctttattatcatgtaatatgcttatgtttttacctttgattaacttataataagatttatattcttctatatttacagaaactaaattatctctaaataatatattaaatttaatatttttccagtgtttaggtatccttggttcaaaacttaatttatccttttttattttcattcctgcaaatccatatactaaactcatccatgttccacccatattagcagcatgtattccatcacttgtatttttttgtaggttattaatatccattaatgctgtgtccataaaatagttataagctttttcatgatttccaatttcacttgccatcattccaaatattgaccttgacaaagatgaatcatgagtagttattttttcatagtattcaaaatctctcttcttttgttctaagctaaactcatcagggaaaagcaacgctgaaagtacagtatctgcttgtttatttacttgatatctatatattgttaatggatgataattgagaagtaatggatatttttcttttggtgtatttttaaaatcccatactgatttttctaaaaatgaatcgtcttgtttgcttattttcttctcttcatcatatggtaaataaatattttgagcggcatttatccagtcttttacttcatattcttgtaatttaacttttctaaatacttcatttgaaaataaattatgcttaaatttatctaccatctgtactgcatatattaaattatatttagccattaaattagtgtagtaattattgtttactattgctgtatattcatctggtcctgttactccatttatacagaatttattattttttaattctatataatctccaaattcaacccaaaatcttgctgtttctataagaatttctaagccattttgcatcataaattcttcatcattagttgcttcaaaatacgttctaataccataagctatatctgcatttatatgaaactgtgctgttcctgctggataatatgcactgcattcattaccatttatagttctccatgaatataagcaacctttatttattccaagttccctagctctttctcttgatgcatctaagattgagtatctataatctaataaagctctagcaatggatggttgagtatatataaaaaatggtaatatatacatttctgtatcccagaaataatgcccctcatagccatcacctgtaagaccttttgctgatatattagtctttccatctcttcctgctgattgataaatatgaaataaattggtttttatacccagttgaagagttttatcgccttcaatctctacatcagaggttgtccaaaactcattcattttctttctctgaatatttttgactttatcaaatccaatattacatgcttctcttaaaaccaattctaatgattttaaatgtgcttctgattctaaacattttaacgactccagacattctaatgattttaaacgttcttcatttagatttaaatcagaatatactctactatagcctacaacaatttctaaatttaacctttcatcttttttggcatagacttctatttctcgctcaatacattcatctgaaacattataggtctcatttgtaatatttccacaagtaatatatgaatcaaacccacaccataaccctaatctacttctttctgtaactaaattcataaaatacttattgttatatttttttacattaattttaaattgcttcttatttatagatgccactcttgggtcatctactttttcacaattaaacttctccatactattttccattttatttttaaattttatttttccattaaaattcaatggtgttattgtatatgaaatcatcattaattcttctatatcttgtgatactaatctttctatagatactttaacttttctaccacgagagttttcccatataaatgaacgtttaacaattccttcatttaaatctagtatcctagtatgttcacttgtaataccttttgataaatcaaagcaatctccttcaatagagaaatttactatatgagcattaggtaacttacagatagtctgattttgttttgcatagccataagcgctttctccatatgtaattggagattcttcataaaatccatttacatatgtacccatattatctacatactcattattaaaatcggactcttcaatattccctctaactcctaaatgtccattagctagtgtaaacaacgtttcattggattttattgtatccttactaaacccttgctctataagttggtccttagtagtaaatattaaactcataataacactcctttcttaaaatgaattatgcatgagtttccatatcattaaataaaatttctccatctgtttctattacttttttataccaaaaagcactttgttttttagttcttttaaatgagcctcttccatagtcatcagaatcaacatgaattatgccatatcgttttgtcatctttccttcacttacactggttacatctatacatccccacataagatatcctataagctctattccatcttcatttactccaagaatcatatttttaatatgttctttcatgtaatctatacgataatcatcaattatttttccatcttcatttacaatatcttgagtacccagtccattttctactataaataaaggtaactgatacctttcatataactgattcatagttattcttaaccctacagggtcgttttgccatacactatttgattttggaagatatggattttttatggtttctggtccgtttgcctttgatttttctaaaccttcagctctagctgaactacaagcactagaataatagctaaaagatacaaaatctacagtattatccttaagtgttgataaatcttcctcttttattattaattttatttgatttgattttaaataataattcataaagcttggatacacacccctaacttgaacatcagaaaaaaacaaattatgcctttcatgctctaaagttgcaaatacatcttctggtttacatgtgtatggatatgtttttccagcagctaacatacacccaaacttaaattctttatttatataccttcctatttctatagtttttgcattagctaataattgatggtgtgctgcttgatattttttctgaagttgattttcatcagctataaaagttaacccagcacctatatatggaatatgaattatcatattcatttcgttaaaaggaatccagtatttgacatcatctttatatcttttcatcaaaatttcagcatattttacatataaattaaccactctcctatcagcccacccagaatatttttcaactagagaataaggtatatcaaagtggcttatcgttattaatggctctatattatatttttttaattcttttattatattatcataaagttgtaatcccttttcatttggttcactttcttctcctgttgggaatattcttgaccaagatatagaaaatctaaaacatttaaaacctatttctgctaacattgctatatcttctttgtaattttcacaaaatttaatccctatatgacttggatagtattgattattttcatttaaaatattatcctcatctaaacatacatcttttaatctcttatcatttaatgggagtttatcaaactgagataaaccttttcctccatctaaataaaatccttcactttgattggctgaaattgcccctccccataaaaaatctttccctaatttcatgcatctacctctttcacagtataaagttttataatttctatctcatatttagttataagatttttttcatactataccttttaaataattcaatttaaaaatccaattatattttttactcactataattaatattgtctattttcaatactttcatattaaatatcaatattagatatctatgtatataattatatatatagcaaatacatttttatatcctcattattgttatcttattctcatatattgctgtatatttatatatataaaaggatttatttcgaaatagagattgtattgagaactaaaatttagactttataaatgaatggaattttcattgttgaaatactgaaaatatatttgatttcatataaaagaaagtgcctcatgaactaagttcattttgaggcacccccttttttctccaagctattatatctttttttaaattctaatggagagactccaattttttctttaaatactctgtaaaaagtttttgtacttccaaaaccaacttcttcaaccaaatctacaatggatatattgttattaagtaatatccactttgctttttctaatctatattcatttaaaaaagttataaatgtttttcctgtattttttttgaaaaatttagtaaaataatatacactaaatcctacttcataagacacatcttctaattttataggttgtttataatttttttctacatatttgaatatattgttcaatctctctaatatctctttagagtttatttcatattctactgtattttcttcaatttctctaggaatctgtctatataatataggaattaaattatacattttaccttttattgcataactatatccttctattttgtataggtcttcattgtagatatctatcaatatatcgaaaactgactttcttatttttgctgaccaatctctactacatttttttatactactgaataaattaattaagctttctttttcctcatttaataaaattaaatcattaaaaaaagatatatcaaattgaaatactaatctttcacttcccggtgatggcagtatataatgaatatctcctccttttattatcactatctcgcctttttttaattgcataggcttgtcatttataaatagatttactacaccttctgttataagtaatatttctatttccttatgccagtgtggtgttgttaatacttctccttcatttgatagactacgaaaaggaaattcatgtattaatttaggcatttctaaatatattgccatagatatcctctcctctctagtgtctaaaaattaatctatactatttaaaagaatacacattttattttaaaaacctcaaatttataatttatacaatacctacacttcataaaatatatctaatatttctttttttgtatgtacatttaaaagtctttcacttatatttttaccacctaaaatgtaagctattttagatattaatatcatatcttcattgcctccagattgtggcatagcaaacataattattacctttacaggtaagccatctatacttggccaatctacaccttttttagatttacctattactatggatgccttctttacatattttgtttttccatgtggcatggccatttgataacctatactagtagagcctattttttctctatgttttaatgcctttataaacttactttttaaagttatacttcctgtatcgtataatttatctactaattcctgtattatgccttcttttgtagttgatttcaaatctaaaataatgctttcttctgttaatatttctctaatttccatttgttttctccaatagattattcttaaataatattttaatatcctctttgctcttgcaatctattatatagtttatatagttcttttgcctatataaatttgatatttccattaaaatattctttaaaaaactttgattactaatttctaaataaatatcaatcgttctagtaacattattgatattcattatccctttatttaatttactttgcttatgtatatatatattcaaatcttttcctaatgaaatagattcatatttactccctaaattcacacctattaaactttccatctgagctacatcaaaattaaaatatatattatcttctaaatacattcctaataagtttgtatctaagttcatactttttttaggtttagaaagtaaagcattttttatattattaatatcactttccattaatagtactgatacaactatatgtaatttatctttcaaatctaagtttacagtagatattacaaagtctacatcatctaaatttcgcttactcaactgatgcataggaactatatcaactatagtccattcaggaaattctctttttaatctggctgcaaggagctgagatgttccatatcctgtatgacaaactactattactcttttactactcatatttctttctattgccgcttgaaaatatgtggcaagatacgaaacttcatctatactaatattcttcagattatcatactctgtcataatatttatagtcatcatacataatcccagcacatctgaaaatcgctcttgtatctctcctaacaacgggttttttatttggatatcatatcttaatctgtttaacataggccttacatgagatgctagacttttttgtagtaagtcatcatttttgagatttatatttaaaaattgtgacatattctctatcattatagatgaaactttttcactttcacttaatatatctgattcatcattataactactattattttcgctactaaatccagatgataccaaaaaaatatatatgtacataatttcatctttcgttatttttactctgtatctattttctattttatctataagtgtagtgacatttttatatactaactcgtccaaattatctacagaaatttctctttcttcctgagattctatttgattaccttcttcgattctctttaaacatataagtatatgggtaattaaatttatatagtagggctgatttatagtatatcctaaattgtattctaattctgtaattatagtttctacaaatataatagaatcaatatcaaataaatttatcaatgcactaaatgtagcagaatctaatcttgttaactcagatatatcatgttgttcataattttcatctaataaatcatccatcattttggcaatcgatttccttatatccacttctttacctataatcttagttccttctaaagttttattaagttttaaattgtattcttttatccatgcctctatatatttaaaatcatttactatagaagttttacttacataatatttatctgctaactgatttattgaagttatattatttgaatttagtaataaatactttaaaatctccattcttctctgctctactgataaagatttattttccttcgattgtatatttaaactattaattaagtctatgttcttctttgctaaatcttctattaatattccatagcctctttttatatcaatttttatattaaaagtttctaaatatttctcaatcatcttcaaatctttttgtaaagttttatcagatacatttaatttatctttaaagtattttataggtctatatttattttcgtttagtatcaatttaagaaattcaatttgcctcgacacaagcatacttagccctccctacctatgtttatatatttctatgtttatattaagtactattttaacatatttactaactatgtaaaattactaagatacttctgtatcataaaagaatttatgatacaccttactaaattgatataatagataatataatttcaaaataaaaattaaggatatttagaagtagttaactgattctaaatatccttattattattctatatacttgttgttattccattacttatttttactattatttataatttaagcaccaagtaattcaacttcactgttttcacttcttatagtaggctttgctacccctataatcaatgctgttattactgtaccaatcaatatacaagctatatatgcaactggtgcactacatgcaaatggtattacaaatattcccccatgtggtgccattaaagttatatctaaactcatacagattgccccacctatacaagaaccaattatatttgctggaatcattcttaatgggtctgcagctgcaaacggtattgcgccttctgttatgaaagatgcccccattatagcagttggtagagatgactttctttcttctttagtaaacttatttttgaatattaacatagctaatgatatcgctaatggaggtaccattcctcctaccattaatgctgctgatggctcaaatatattacttgaaaacatagccaatccaaaagctgaagctgttttattaataggtcctcccatatctgatgccatcatccctgctaatattgcacctaataatactttattagttccagacatactttgtaaccaagattgtaaagcttcatttaaccatgatgctggcgtattaactacaaagaacattatagctccactcgtaaatgcaatcaaaagtggacatatcaatacagcatttactccttttaatacatctggtaaattttctgttatcttcattactcctaaagctatatatcctgttgcaaaaccagctaccataccacctataaaccctgaacctccaataactgccataaaaccagctatcatagcaggaggaaatccttgtcttcctgctattgatttagctataaaaccagcaagtatcggtataaataacttaaatgctgaatcgcctccaagttgtccaaagaatccagctatagggttgtatgtttcatgagttgggtctgatgcaaatataccaaacataaatgctatggctataccaattccacctatcactacaaatggaatcatttcagatacaccactcattaagtgcttataaacaccctttgtctctgacccttgaagcatttcttttgaatcttctaaagtctttccacctggtttaatttctttagccattccattttcagcgtttataattaaatttttagctaatgaaacattcttagcatctactactttcttttgtagcactttctttcctataaatctactcagttgaacttctttatcacaagctattattacgtattcagctctttttatatcttctttagtcaacttattttctacacctatagctccatgagtttctattttaacttcatatccaagttcttgccctgcttcctctaatgctttttttgccataaaagtatgagctatacctgttggacatcctgttatcccaactataagacctttattttgattattactaaaatctcctgattctgcagctttattattaaatatacttaatatttcgtatggagtttctgcacttagtagatgcttaagaaaattttcttccattagatatgtagctagtttagatataatcttaagatgttcatctgaacctgattctggaactgctatcataaaaaatgacctaagtttttgaccatcattatctgtaatctctctatctgttcttaaatacatcattacaggttgatttactacatttgacttagcatgaggtatagctattaaattacccatattagttgatgattctttttcacgtttattaatatcagctataaacttttctttattatttatataatttccatggtacaaatgatttgccatataattaattacatctttttttgtttgtaattgtttatctagtacaatacaatcgcttcgtagtattttacctatcataaattctcccctccttttaatttgttacctcataattaatttttatttttataaaagcactttaacttatctatagcattgaatagattcattttaaactctataacttctcttgcagcttttatacatggtggatatatagtatctggctcatataagcttgggttttgttctaatagttctctgcacttcttataatatgccgacttaacatcactcgaaatatttattttacaaactcctagtttaactgcttgtgctatttcttcatctggatttgatgaaccaccatgaagaactaaaggtatatctactacttctcttatttcttttaataaatctagtttaagctctggtttaaaaccttttggatatataccatgtgctgtaccaattgcaatagctagtgtgtctactcctgttttttcaacaaaatccttagctaattttgaatctgtatatattatttcatcagtaccaccttcacttgatgttcctgttgttcctattgttccaagttctccttctacggacacatttaatccttttgctatttctactatttccctagatatagctacattctcttcatatggtaaatgtgagccatcaatcattactgatgtaaatccacatcttattgcccttaatatttgttctttattttccccatgatctaagtgtattaccataggtactttactcttatttgcttcttctatgcaactaactacaaagctatcgcctagaaaacttagctcatttgggtgtattgcaagtattactggtgcatttttttcgttagcaccctgtactactgctttaagtatttgcccacttcctatattaaatgctggtacagcaaattgattttcttgtgccacttttagcatttccttcatattgattaacatattgtacctcccgatattttaaattttaggttgaatttacttcttgttaattttgttgttgtttatatttaaataatatcagggtaatgaagctcagaaaataacaatcgttttccttattgaaaaggaacttttattatacactctaagttccttttcactaaataatttttagaagtctgtatcatagttaattatatttctcatgtacatcttctctttttaagtgttttaatttaatgtgctttagccatcctatatttttataataaacaattaagatactttaactataaatttaaagatactcatgtaatagttaatgctatatgggagtcaaaaaattaaaaagatattagctatttagccaataccttttcttggatttcaatagtatatacgatttataggaatcatactcacgattatttaatgttttacttccataaactttacataaaacaccaaagtgtcacccttcaaattcatctttagctaataaagtgatttggttttctaagcaccaatttataaattagcctttgttatcttatgtaaatctttttctatctaatttaaaaattattcctaatgctatatagcatataccaattactaatacaccataagccatagatactcctatcttaaattcttgcatattagttacaatagaaattgaaataggtctattataaacaccataaagcaaggctgacattgtatattccccaattgtacgaatgaatactaatatagctcctgaaattattcctggcatcatatttggaactattacattataaaaggtttttatccttccagcacctaaactccttgatgattcttctagtcctaaatttattgacttcatagcaacctcattggatgaaaataataatggtagagcataaattgtatatgctataggtacaatataaaaacctcctattaaggattcattaaaagcaaatatacttttttgattaaatgtattaattaggttaactgcaatggcgcttgcaggcatactccaaggtaacattataataaattttgctagtcgattatatgcagtatcctttttaattactaaatatgatactggtacagtaattatcaatcctactgctactgccattaaagacattttgaaactatttaatataggctgtaatacacgtgatttttggaaaatcatctgatagttttccagtgtaaagtctctaggaaatatggttgtcataattgaatgtgtgcttacaaaggataaatacacaatagtaactataggaagcataatcataataatttgtatttcaataataaccttacatacaaatgtaaataagtctttttttctattatgaactttataactttgagattttaaggatggcactactccatattttttgccataatactgtaataaaatcataaataaaatccccattagtaataaagtaattacttgaactgaagctatatccatatggttattagccttagacctaacaatttgagtgcttaaaactttaaaaccaccacctataagatttggagctgagaaagaactaatccctgatgcaaaagttataatagtagaagttataacagcaggtgtaataacaggccatattacatcaaaaaatactcttagctttgatgctcccattccttttgcagcttcaactgttgagtaatccacatattttaaggcaacatatacatttaaataaaaatatacatactgagtataagcaaccacaaataaaattccctttaatccactaaaatcataaggttttttgataaaggggagtaaaatttctatagattttgtaactattccactttctccataaatctgaatacatgcaattaccataattactccaggaatcatcattggacttagtaaaagaatatgtatgattttcttatgtttatcacaaacaaatgtcatatataaggcaagtgatattcccataattccacatacgaacacagaacccaatcccaaaattatagtattgcttactacccttaaattattagtatttgaaaaatattctttaaaaacttcaaaagaatatccacctttaccttggaatgcttgtacaaaagtattgcctattggtatgataatatatccaatcaaaatccaaaataatatactgtataaaacaataaaaataacatttttagatgtaaatttactacggtttatttttttaatcatattagtcaccttgtagcacacctaaatatgccatatcccctacgtttaatttattgctattattcagtctattaagctcagttacttgatattttttcccatcatttgatactgtatattctaaaattgctcctagaaaattcttagattctacttttacttttacaaaaccactttgatttgtattttgcaataatatcatttcttcaggtcttttataaatataaggctttgtctctttttcaatattaaaattaacataatcttcttttccaatacagtttgaagtacctacaaagtttgctacaaaatcattcaatgggcttttgtaaacttctattggcacaccaatttgaagaactttacccttatccattacagcgattctatcagaaatagctaaggcttcttgttgatcatgggtaataaataaagtagtaatacctgtcttttgctgtatctctcttatttcttctctcatcttgattcttaaagctatatctagattagacattggctcatctaataaaagcatagtaggctcagtcgctaatgaccttgctactgccaccctttgttgctgtccaccagataattcatcaatcttttttttcctaaaatctttcattcctgacagctctaaataattatcacatttttcctttataatttttttagacagcttttttattttcaatccataagatacattttcttcaactgtcatatttggaaacagtgcatagttttgaaaaacagttcccatatttctattttctggttctaaattggtaatgtttttatcaccaacataaatacttccagaagaaggttttataaatccaccaattattcttaaaatagtcgtttttccacatccagaaggacctagtaaagtaaaaaactctccttccttaatagatatattaatatcatgtaatactttttcttttccataataatgattaatttcttttaattctatattcttcatatcgtctccataaattatctaatatttataaatctctaaatatacacatgatgaatcatcatagattttaaatctaggaaactctattgccatttcatcatccttttctagttccctaacctttctatatatataatctatacctttaatctctgctattttcatcatttcatttttatcaaaaatcttatatctatcatatccacatgaaaaaccatcactagccatcataattttcattttatattctatatcaataaatccacttacacaattgtcaacggcctctttagaaaattccaaagtccaatatccccccacagtatttttcttaagtctattctctattataatcgcattacctcggcttttctctcctttaaagtaaggtttgtagcatctttggcttctttcataaaatcaaatacttttttatcaagttcacataaagtctcatcttttaaaattttcacagattcattattgttaactaataaagtacaatctcctaaaagtaaatactctatcttatctttataaaactttaatatagaacatgaacaagaaggaatatctattgcttctacttctttatcatctgttaatttgtagtactcttttgttatctcctcaatgccttctttaataattacttttaagctatcttctctttccatattctcatgaagataactattccaccaacttacataccatttggcatcactttctgtagagactaaatttttattatttaaacctgtagctccatcaagtacccatgccccataaggtgataaacctacgatatcttcgttaaaagcgccactacctttattacataataatttataatcactaatttttagttccatttttatctccttgcccatataaattgtacttttactataattaaaagttttgcataataaaaaattcactttatttgagagactatgtctacaaatcactttatatagtcaattacttcatcagttactcaaaaactattttatttaataagtatgtattagtatcattttgttgtatgaattatacaaaattatgagatactatagtttccttatacgtaaaatagcgaggaaaatcctcactatttttgtatataatattaaattatttaattaggctattttatagttttattgttatctattatatctgtttcccacttttcaatccagttagactgattttttccaattacagaccaatctacatccatagctttatattcttttgacatccactttggtgaatctttaagtgcagaatctaatgttggaatacgattaaaatcatttgcaaccatagcttgaaccttagcacttccaacaaaatctacaaatttagctgctgcatttggatgtggtgcattttttagagctgctacacagtctgtgattactacagaaccgctctctgcatctacaacttctaatggcatattatttttttctttattctctattatatcacttaatactgcaacagatattgtagcttcacctttacctattgctgaatacatgacacttccactattgtagtaattctttatattcttatttaaatcctcaagatacttccaagcttcttcttcactcttagtatttgagtagtaattgattaagttactaatagtagaacgcatagatgatgataatgaatctctagtaactattaagtctttgtattcttcttttgttaaatcactccaatcttttggcgctttatcagctgataatagttttgtgttataaaacatcattactggtgtttttatagttccataccaatatccatctgaatctttgtaagacttgtctaattcattattccagcttggttcagtcttttcatataatccttcttcttttaattgcatgtatgtagatgtatctccaccaaacattatatctgcttgcggattatctttttcacttctaacacggtctgctagttcaccttttaagtttataaattcaacattaactcctgtttcctttgtaaattcttcagaaattgctcctagcatatcctctccatgtgtagtatatactactaatgtatcctctaatttatcactttttgatgtgttatcattgctacaagctacaagtgataataacattgctacagttaataaaacaactgctatttttctcttcatattgattcctcccccatattctccatgttcattttaaatgttattattcttgcagtcaatgattcaacaacaatctatataattgtatttttctataacagcttattttattattgtttttttctataattatacctatttttatacatataatttttttattaacattaatccatttttcaatctggatattttatttctttaaaacctattttaaatattagtattattatcatttatatacataaaaaatgacctataaataggtcacctaaaataatacttatatagtatatgagatactttcttaaatcacttattatttttttatctagtccactttcagtaaatagtgtatgtatgtgtatggtttccattttaagtcttaattaaaagtgtgaactactgtaagaccatatctcatcctcacatctaagctttaaagttttatctattatttattaattggctgtatattcactaatttttatcatttacagtagtcttcttatcttaaaataattacaacctaactttactcatacattatattatttataaatatttttaacaaaattaataattaaataactatattttattaacaatcttataaatatttatatcctatctactaatcttcttcaataaattcaaacaaattttctactgtggtcccgaatactttagcaatatccatcgctaactttaaagaaggattatattttccattttctaagtgtacaatagtctcacgtcttaccccaactgatttagcaagttcgttttgtgtcataaggagtttttctctatattctttaatttttgttttcatcgatattgccacttagttacatatcccccttttatcaaagtatatatacaaaattaatttagataacgattgtataaataaaactgcaataagaattataccagtatccaagtttgatatatttatattacttatataaggtgttgcaaagaaaatagctattataactatagaatacatcattattgttattgcaatctgattaacctttgatagtataaatttagatgattcatcaactaaatcattatattttttattataaattgaatagcatccaaagactattaaccagctcagtcctggaagagatgcagtacttggacctttaaaaatatacttagtagctaatacagctataaaaagataagttattacaagtaattccaatatgagttttgattttacaccagtttctgatttagacatataaaatccaccttaaaggttatatatttataacacttcatgttataaatatataacctttccaaataaattgcaagaaaatattgtaaatacttaataatatttttacaaatatagtccataaaagatttcataatagacatctaatggttacaaataatattataaaattacttttttattcactcctatagaatcaacgctctaaaaaattcttataccataaaaatatattctttagtaagcagtacagtactagattagtttattatatctattgtttcaatcatatcatttaccaactattatcctaattaatataagatattgaaatgtataattatacagcctaagttcactccaatacaccctcaaaaatatctctttttttgtggatgaagtacagttggggatttcattactaaaataaaaaatactagccaatattgactagcatttacaagtatttctaagtatttcattatttatttttacaaatcattagacacgaatctcaagattaatacacaggattaattcatttcatatacaatcctaggttttcatcaaaaatatacgtcactttactatcccatgatataatacaacagaaaaaactacaatctatggtggtttcatatattcttagttatattagtaggaaagaaatgtactccatatggaactaattataaattttattattggaactatcatttctatttgtgttggtataaatacaaattatatatatgataaaattctaaactacttatctattgccatagaaaaagtaatttaaaatttgaatttaaaattaaatcttaaatttatttattacaattcattagttcgaaaaaatatttagagtcatgcgtcttataaaggttcaaccaagaacttaatgcttcttctttaaaaacatctaaaacttttaaaacttgtactgtaaattctaatggtgcaattccagaagcagtaattaaattttcatcattaaccgcagattccattttataatatttttctccagaataacttagtatcaccatttttaaaaattctaaatcattacttgtatgatttctaaaatctagtaaacctgttttagctaaccctaaagtagcaccacaaatagctgcaactatagacctttgttccaaagcctctttagatttttctaatattttctcatgacctatagatgtccaagtatttccccctggcaaaattaataagtcattactttcaatattaagctcgtcaattgtaatctcaggtaaaacttttaatccacccattgttataataggatttttatcaactcctactgtaattacttttagtggttttaatccttttttaaaatatcttcctgtatttaattcagcagttagatatccaacttcccaatctgacatagtatcgaatacatacatatatacttttctctttttcatttttttgctccttctataattaattaatatacctaattgtaaaataacttaactgacatactctgtcagttaagttattaaatttgataatgattaattaattcgagtaaatcttcaaccattttatccctaaggcttaatggttcaattatttgtatagattttctataaggtataagtatattcggtacatatgtaaatattatctcttcttgaagtttaaatattgctttatttgaagtcctttcttttaaataatatcctagaagccaatgctgacataagttatccaatgcattcatctttccttctataactaatgatataagattatcctcatcttttgtttcatccataatccctcttataaaaaattcacttgctgaaaattcttttggcctattaaaagtatttgatgtttctatgacactactaattctatctaccctaaaactacgaatctcatttctcatttgacaaaatgctactatgtaccaattattattccaacgtacaattccatatggatttataatcctacattttgatttttcttcatgagctgtacgatagttgatttctacagataattcatttgctatactattttttaactttttaagtacagattctatggatatttttccagttggttttattacttcaaaacctattaaatgttttgttaaagtttcttcttgtttttgatttgaatacatttttaactttgaggttgctttgtctagtgtgtcatctaagaaacttccctcttctttagcaaatatagctgcatgaagtaacgcagtttgttcttctgtatcgaaaaaaagaggtgctttgatgaaattattcaaaagtgtatatccaccattatgacctgtatctgaaattataggtactccactagcagataatgcatcaatgtgtctgtagacagttcttatatttatttctagtttttcagatatttgttttgcggtaacttttttgtctgagtttaacatccataatatggacatcatattatcaattttagccatatagttttaccctttcatatatgttttataaatttaattatataggttattagattaatttttataaaaaaagggctatcgcacgagcacactaaatttgttctgtaaaggctccttattcttatctagttttttaactatttatcttggatacctttatggtacattaatccattttctaagtgtacaatagtctctcgtcttaccccaactgatttagcaagttcattttgtatcataaggagtttttctctatattttttaatttttattttcatcaatattacaacttagttacatatcccccttttatcaaagtatatacaacactaatttagataaagactgtataaataaaactgctaagagaattatacctatatccaaatttgatatattcaaatctcttgtacaataagcttcaaagaaaatagctattataatcataaaagtatactctttaataaacattacaatatggaactagattagtttattatatctattctatcagtaatatcatttactgactattattatcctaatgaacatgtagcaaatcacacactctaaaagaacccaatataccatcagaaaagcctctttttctgtagttatggtatgcttgatggatttcatcactaaaataacaagaggctatcgtatgataaaattaaatttgttctgcgatagctctttctacttgtatacttctattcactctaagttcacatccctctggtcttataattctctttaatttttcttttttcatgaaataacttagatacttgtaagtttttagtcctattttcaagaggagtcttactattattacccttaataaagctgcttttgtactgacaatcacgaaattcttcacatttatacacaattttaccccaagagtcgtaatgagtcacaaagtaattcagtttctacctgcctcactgatagtaatcactttatttgtttacttgttatttatattaaactaaatatatcctcttgaattaattcttctttattacctatataaaatttactcatatacaccaattcatcagttttattttgcttaatctcattaatatccacaaattctttattagaagtagttttttcaactgtcattaaataaatcttattaaacattgctcttatagaagcatttgttacatgagtataggatataatttgaacgttgaattttttagcaagttcaaatatttctttaaggaaatcttgctgcgacgtttctccaaaaggattatccataagtagtaccttacccttatatttactttcatcaactattgcatttctatcatatcttttatattccatcaacaatattgtcacaataaatgagatacaaaatctctgtcctcctgttgtttcgttattaatagagttccactttatagtttcatttctatttatttcatattttataactgatacaggaattctccctatattaagagtcttatttaaaatataaaaggtatttattttttgttcaacatcacctaggtttgcttcttctacaatttcatccattagcatatctactaagctcaaactattttctattttatcagatttaggtagtgatatgttgaataaggcttgtcctttatgtttaccaagtttatttatgattttaaattcatcaatacagtccataacataatcttttatttgccttgatattatagtcttttcttttcttagttgttcgctatgtttttctaatttgcttatttcttctcttataactagtaatactatttctacttgttctttttgtcgagagtaattatctttatttacatttaaagtttctataaagtttttgtatttttccatgtgcttataattaaattcttttatttctaatattgtatttttatagctatttatagatttaattaaattatattcaacattttgcagttttgattgtagttttttactttcaataaaaatatcttcaggttgataggttatagcttttctttctactttatatttctttaagtctcttaattcctgttctagattttgacaagtagttctattaccttctataatttcaccaatatcctttatatctttttttatatctatttttctttcttcaaaattaaagttcactattaagctagtagataaaggttcttttccattaaattttttaagtatctcctccctcttagtgtttaatgaaccttgatttttatctatgtcgcttttaatactatatttaagttttcgtagttcatcaaccttacttttatttaaaactattcttttattaagttcttctattgtgaataatataggtatattttcaaaattatcactactaataagttgtctaaattcttctaactctatagtaatactctctattctttttaagcaaactgagatttcataatttaatgtttcaatctctttttttgtagggtcttctaagtatttcttgtattttatttctaattcttctagtttagcattttcaagtttaataggttcataaatcttaaatttatttatcttgctttctgtatcatctatatgcctatttatcctatctttttctgaatttaaattaaatatattaacatcaatatcttctattgattttttaataacttttttttcttcttcgattttttcaatacttgtttttaacttagttatttcatttttattttctaaaattatagaatatgtatcttgtatatttctaatgtccttcaatttattaaataatatattcttgttatttaatagcttttctttattttcgtaaagttctttaattttattagataaattcttctcattattttcattactcttaattttattgtttatttcaaatataatttttttataattttcaattttcacatctatggataagtcttcagctgtaaaatcaattttattagttagaagtttaaattcttctaatatttcaatttctgctttatattgctccactttatctcgaatactatttatttgttctttgattagattcatatccttttctcttttttcaggatctaaagctttgttatcgaaagaagatagtatatttaatccattactaattacaaggttactagatgtagttataaaagtatcttctatgttatctcttacaaatataggcattgagattttagttttattttttaagtttatttgcttcagtttttgatactctttatttgtaattattatagaatatggtagcaatggatttttagatatgagattatttttgtattctaaatctccatctaaggttaatagatatttcatgccttcaataggttttattccatttctttctagatctgttaatatttcttcttcgaaaattatatctttataattttgtaaatcttctagctctttttctaattgctttttattattttctaagtcctgtacttgaagtttcattttgttaagctcttgttttacctctttatatagtttagtagagttatctaattcattgtctatttcaaatcttgttttaatgattttatatttttctttaaaattatctatatctttctttctagtttttaatacttgcagtttcatataagattcatgattatctaatttaagattatttatagcttcatttatatcatccttaagtttattcgattcttctatttgcatgactttcgattcaagattttcttctattgattttacttttatatttaaataatttatatacctagtataatctattacttcgcctaaaaaattattagaaataaagcctttaatatcagtgttattaagtttaaattcatgtagttgattattaaaatcacgttctttgccttctatatatttaatttctgaatttttacttatcaatacttttgtgagcttacttttgtcatcattaagttgattctttttttcttgtatagctatattgttgtttgtattttctttaagtttttcattatttataatactttcttcctttaaacaataatgaatactgctacctagacgatttataatagccgttatttcttcttgatttacctcttttctttgtttttcactttctttttctatcttatctttttccccttcttctagccccttcttttttcttttgaactttgatatatttaaatattgttcatctaattctagttcttctattttatcatttaattcatttttggctttatcaaattctacctgagtatcttgtatctctttttcttttctaaaatactcatagctatcttcttcatattctactatcttaaattcctcttcttttgatgctttcattttttgatactgttttatttcttcatttaattcattgcgtttattttctatatgtacatatagattagctaattctcctaatacattatttttatcttcttctatgaataggatcctatttattttattttgtaaactttcaactctaatgtttaaatctctatagtttttataatctgataatttttcattcatgtctataatattatttatacactttcttacttgttccttaatttgcaatattggagcgaattcttctgttgttaagcttgtctctattaaaggtaatattttatctcttataagtttttctgaagtattatgttctttaacaaagtctgatagtccaccttctttgttattactattaagttttataataatttctttccattcactttggttaattccatattcttctaatttttctctatgttgttttcttaagtaattattaaagaagtgtactttgttttttccatatttatctcttagcatttttatatagtcttgtgaggccgttaaaggttgtactatccttatacctttgtcattgttttttaataaaggtatattatctatatcaacctccatttctttagattcttctataataaacataaagtatttgtataaatcgtcctttttttctttcccttcttctttagatgatccagcctttttctcaaatcctattcccgttaataataacgttttaccatcatctagcaaccattcagtcattgagtataatggttcttttttattatatattgcagtaaacggtttggctacatccgatagtggacaaatactttgtatgatagtttgaatactcatagttttgcctgctgtattttctgcttctacttgtaagttttctccatacagttccatggttctgttgctaagtattctttcttgtcccataccaaatttaaaatttataattttgtatttattaattactggcattaatactttccccttttcttaaaactagtttttctattaatactttcctttcttcatctaaaaaataattattcataagatcaagaaatcttctagttggttttatcttatcttcatcctcaatgtgtacaattaagccttcattttttaagaaattaattatttttctaataaaccctatttggaaatctgctgatgttgtttctattcctttcttactagattcgtcccactttcttttactttcccaatagttctttaagatagttatattaaactcacatgatttttctatttcttctagattatcacgagctattgaacgttctaaggattcttgtactaaatccagtaagtttaatacttgaatatatgatgctggtgctaccccatttgtaaattcagaaaatattattgtcattatcaaatatcctaaataactatcttttaaatctttccctaataaagattctcttctatagtcaaacccaaaaatatcattgtcattatttggtattaagtataaggtatctgaaattaatattatttttattttagatacttcacaaattgcctctaaagcataccttacattactgttatttatataagctaaaaataattctttagcttctttttcttttaactcactttttttaagtaatctataaaatatttcattggctattttatagtcatttaaagatatattcattgtatttccccttatatttagattatttcaaattttatatttgctatttctagcttaactgcagtcatagtttctaaatttatttcagtatttattttcatttcatcttcaaatattttattacttttaatatggctaacgctatttaatagttcaaaatcttctactaataaacgttctattaatctttcaatttgaaaatctgtatttggtgagaaggcactattttctaacattctgattatctttttgatattgatactttccctttgattagcgaagtaaattattatatctctcatcaatttggagtctttagttatttctaagtaaataactttgtcatatttcagataattttttagaaattcttctaatgtaaattgtcctttttcaagtccatatttaattaagtatttaaaaaaatcaaaatagtaattttcacaataatttatacgttcctccttctctttattttcaataatttctaactcgtctttattaactatttcattttcaatttctctagtatttaatagtttctgttcttgatatgccactccaatattaaatcgatttggcaactctactttaaataaagatatatataattctcttattatcaataaaaaatcactgtctttttcaagtctatctaagatttcttccttgaaattgaatcttttaattactggagttgttaatagttttttaagtatttctttaaattcttctctaaaatcttgaactctagataacaaatttgtggctgtagactttgctaaaactattccatctattaattctttcatttgtaatagttgagttcttatattttttatcttttctttgtctatatcctcatccttttccaagtagtcctctttatctttgattaatagttttacttctttttttaattcttcatatttgtccatttcttctaaaagtgtttctacagttgtatctattactgttgaatatttttcttcttttatatatagtatatttacttttattatttttatataattatcaattttctgttgatgaatctctaaggtatttattatatcgtaaatatcttcctttgcgccttgataatcacccttttctatccttaactttgcaatcatttgtgatatttgaatttggaatagttcatcatattcttttgttgataacaacaatctataaccctctgttgttaaggagtaggatagtctttcctgattatttatttttacatttttatcttctataattttaatactttcatctatatgtttttcttgttctaaagaatagtaggtaaatagatatactttaccactattggttaatccattaattatatagtttgctaaatcctttaagtcatcctctgaaagcattattttataatccatacgatttatttcttcaataaaatccttaatatcatctcttaaacagttctttcttctaagagatctatcaaatatataacacaaaacttgaattaataaattgtaaaattgaatgttgtcaaattctttaaatttatttctattgttagcaagagttgcaataagataataagatcctatacagtttactctcttattgtagccttctaaaatattaatcatttccattagttatattcctccaagtcgaatctatttagagcttcttgaggtatgtattttccttgtactaaaatatttttaatactttcttttaagtttaggttattaatattttctaatccacattcaaaattatctttttgatttttggggatattcctcaaggtattttcctttgttttatctatcatatgctcataagcaacttcaaataatcttatattattaatttcattggtatcttttagggaagtgtatattgataatccagttttatctatatctccccaatataaaaattcattttctttatttgtaagatattcaattgttatatcttcctttaatcctttaatactgttgattattttttttccttctccgtatataacagtatctattttatttttaagtatttcttttccttctaatagcatttttgttattgttatgtaagtgtctttattttctataattaatattttttgtggagatatacgatttattgataaatatatgaatggctctggtgtcttatatacgtttaaatcctttattagatctatttttaagttttttagtacttcttttcctactttactacttatgaatttctcatccttaaatatttcataagatctttcgttaatcgatattttctttgatagattatcagattttttaataagataactatttaaatccattattgcaactctattatttttatagtgtactaagttttttctataataatctatacttaatttatcacatattttgtaatttatttcttctaatatttttttatcttcttctgtttcttgttttattattctatactttgtatataattgctcatgctgaggtgttagatctgaggtttttattggttttattttattatcatttattagtttttttattatgtgtactagttctttatgctcattgattttgtatattttttgtatttccttaaggtatatataagtcttttttatttttgtaatcatacatgtttaaatcccttctttacttataactatattatacaccattttacaatttcagattatattgactgtacataaaatagtacatattagataatgacaataaaaaaactagaacttaaagaaaatctatcagcactagtttaagtattatttatatattttgaatctctgtttttatttattagtataacaaaaacttaaatccttaattgtagatgtcaacccaaaattgttccaaattttaattgaaaataagaccactcttcatttatatataaatagtaaattcaaaataaaatttcacatgaatttactattctgcgctataatgcaacagaagaaactacaatctatgaatgggtttcatatagtcctagttcctacagtaagtaggaactaggtgtattctatagaactgatgatgaatgaattatactcatcttaggagacagttaaaatatgtaagactatctaaaactaagatatcttcagagcaaaaaaatcgaagcaattgaatcatatttaaaaggtgagaatacagtaataaaaataatggaagaattaaatattggataaacgtacattcagagagtggatgcgaaattatgaagcttttggaaatgatggtttaataaaacaaagttgtaaattatgctattgtgaagaatttaaattgaatgctataaaatcttatctaaatggtgaaggatcttatgacacaatctcaaaaaaatataaaatgagatcagtttattcactaaaagcttggggtaaagagtataatcctcataagtagataaaagaaacctcgaagggagaaatctttatggagactagaaaaacagcattagatgaaagagttgaaattgttaaagattgtagagagtgtacagactaatgagagccgtaggcttaagttctgtttgcagaaaaaagaaatttagttatgttaaatgtacgccagaagtgatcgcggaaaatgtattaagtagaaaatttagtgcagataaaacctctcaaaaatggttaacaggtgtaactgaatttaaattaaccaatgggatgaaggcctatttaagcgcaattctagatttagacgatagaagtatagtttcatatgttattggaaagtcaaataacaataacttggtgttagaaacttttgataaagcaatagagctatatccaaatgcaaaacctatttttcataatgataaaagtttccagtatactagtaaggtatttaaatcaaaacttttaacacaaggcatgatacaaagtatgtaagagttgctcgttgtattgataatgctcctatggaaggattttggagaattttaaaagtggaaatgtactatttaagaaaacttgatacatacgaacaattagtcaaaacaatagaggattatatatattactataataattttagatatcaaaagagattaaattctatgtctccacttgaatttaggaaatatttaaatacagagatagcataatttattttaagtagctctaaaaaaatttaaatacctagggttttatttgacatgctcttttttagatatctgatataatttctttggctaattgttttcttaaagcgttcataaaaaatctcctttacgacatttgattatatttaaataattgccataaagaagatttttattaaccttaaaagcacaaattattttacattaccatgatttattttataacttgttaatatatttctaatagccttgtctgttcatttaaataaccatcattattcattactaaagtatttatttctttaattttatctctttttaaatttaatgattcaaatttattatcttgtattttattctttataaataagtatagaatcatatttttcatattagttgaagacgccttatattctatatctgctatgggtgaacaagatattatttttttaatatcttgtattaaataattattttccaagtctatatcataataataacaaatagaagccaacacaatagatactcctatcaagtatttactttgtctttgcttatcatcagatattaaacttgttgagaatggatattctatcttctcagatattttcagtatcatcctattaaactcatcaaacttatcttttaataactctaatttttcactttcattatttttatactgaattgacttatactctaaaaatttcttagaggctgtaactccatctctgatattttcttgtagcccattttctaaaatactaaatattatacatatttcttgatgatttttttgtttatcattacgagatttagttatgttatatattctaagtaaatctgatttgtaattagcatatttatattctgatttatctatttcatccttatatttatcttttattagagtatttataaatttacttatatacttactagtttctgaaaaatatgttgccatctcgatttcttgcatctctaatggttttgtatttctgttatatcttttaaataattctatttctatttctggattatcaaaaccatcaaattctagaattgataaatgacttcctaatattttaattttatcttttttctctaattctgaaaaccttttattatcatatagtgggtcattgcctaatatatctaaatttttaagtggatatttattcttaacatacctatatatagcattcaaacgatgctgcccatccattacatgtcttatttgcatatcatttacacctatttttacaagaaatatttcaggtattggtattccaattaaaagagattcaattatagaactttcttccttgtttgatgatttatatgtacgttgataatcaggactcataactattccttgtaaaatttccatttcatctatttcatctattgataatttcaagtacttttctcctttatcaataaaattcacaatatcttggactgatacaagaggtctgtttgatttaatattttttatagaatttttaaattgttctctcattataaatttccccctactatctcatcataatagaattttatagatttaactacattatctttatctggataaatattttcaaatgtaatacctaaattaaataattcttttaatatttcttttttagcatctttattaataactactactttacaatacttttttaatttttccttaaattcgcctttatcttctgatgatacttttaggaaacatcctttttgaaaatgtattctttcatttgaattccctacctttataaaaaatgatcttgatgaaaatttactacaattatctattgcagatgtatctgaataatttactaacttctcagatctttttatagtgtcagtattataagaaatagagtctataaagtacacaattgaatgctgttttgtatatttatagtcttctattgcaaataataatgatattaaatgagcttctgtgaaatctaaatattctgttggtagtccaaaatgttgcccttcagctcttaattcttcactcgatctattttttatttctttatcataataaattattttttgtttgaatgcttcctcgtattcatctgaatgtataccatagtcttttttatattttctatgtaatgatggtaataattcatacatacaatctttttgccctctagatacatagtcgcctgcgttatctagttcagataaaaatgaaacatactgactcaaatttgatataaatataacttctgattcaggtatacctatatatttagacatagtattttgtatattatactctttccacttttcattttcttcatatattttatttacagctttagatatatgttctatatttatatttaaatttcgttctaatttaatattagttatatcaactaagtcctctattttaacattttttaatatatctatatctatagaatttatttcacttttatcattagtatctataaaatatgattgctttaaatagcataagtttttcatatatagttcaaattcagttgaatcttcttcaaatttatttacctccataagcatacttttaatttgctcatctcctaattttgaaatatattcaatatcatctataaatttatccattacctcatataatacatcatcctgctcacttaaatcattactaattagtaatttattatcaaaaattttacatattactgactgcattttctcccccattaaaattatttttactctaacttatctatattataacaaattttaccatattcggttagatatatcgttttatttatgacaacttagatattttataaaatttttaagtatcatctattaatatatattataaatttaaatcaataaaaaatgggctaccacactagaaaattgatataccctctttatgggaagaaaaattaaagtcttagatgagataaggtaatcttaactacacattgtgttacatataaatatttctaacacacttaataattaagtaactatatttcattaaccatcttataactatttataatctatccactatccttcttcaataaattcagacaaattttctactgtagtattgaatactttagcaatatctatcactaactttaaagaaggattatattttccaagtgtacaatagtctcacaccttaccctaactgatttagcaagttcattttgtgtcataaggagtttttttctatattctttaatttttgttttcaccaatattaccacttagttacatatctcccttttatcaaaatatacatacaaaattaatttagataaaaactgtataaataaaactgaaatgagaattatacccatatccaagtttgatatatttatattcattgtatgaggggttgcaaagaaaatagatattataactatagaatatatcattatttttattgcaatctgattaatctttgagggtataaattctgatgattcatcaactaaatcattatactttttattataaattgcatagcatcaaaaaactattaaccaactcaattctggaagagatgcagtacttggatctttaaaaatatattctttaataaacattgcaatacaggactagattagtttattatatctattctctcaatcatatcatttactaactattatcctaatgaacatgtaatattgaaatgtataattatacaacctaaatgtatatcaatatggggctgttgcatgagcaaattaaatttgttctgtgagagctcttttctaattatcttaataggtatattttcaattgttttatataaagtttctgttctaagtaaaattatgcatgacaaataaagatataaaaataccattttttcagataatatttgattataaataataattttagaatatttttttaaatgataaagatatattccacgtttattttttactattttattgtgtagtctagaaacgttataagctatcgccacaataatatatccttataaaacattttctttaccttggcttaaaaatcttgtaagtttcatattttattttacttgagcgaaagctccttctgcttgtatacttctattcactctaagttcatccccctcgaggctcataattctctttaagttttcttttcttttttcatgaaacgacttagatacttgtaagtttttagtcctatttttaagaggaaccttactattacttctcttaatacaattgcttttatattgacaattactacactcttcacaaatgtaacatgttatttcacttttatatcctgtttttgatttcctatttattattttattagcaaatagttttttctcatttgtacaaatataataattattttcttcttcataatccatattgtcaatacatccaatataagttttatattttctagttttaataatttcataatttgcaggttttatgaaagataactgattattatgctctaaaaatgcatagttttattcactttcatatccaccatcagctattactttaggatatttaaacttagtatattcctctatagattttaaaaatggtattaatgttgtagtatcagcagtttgatttcctgaatttagccaaactatatattcttaatctacaccaaattgtatattatatgctggtttcagttgcccatttttcatatgatcttctttcattctcataaaagtttcatcgttatctgttttagaacaactatttcgttcacccattatatgaaggtttttagtagattttctatttccttttccatgaataaatgctacatttgcttcttttgatattttttttagtttctttaaatgatagattttaattttatcttcataaactattttaatgccaacatcaatctcacatttcaatatgaagtcagatatattattcaccattttagccatatttttatttacagcttttttccaaacaaaagtatatctattagcagatgactctatttttgtaccatcaataaatattgtgtcttttgaaatttcattattatctccaagaaagtttgtaaactgtgcaatcaagcttttgcctattagttaaaaatgtatactgcgaaattttgcaattgttgaatggtctggagtggaggtttcgcctagaaggtacataaaattaatatctcttttgcatgttctttctatttctctcgaagaataaatacagttcatatctgtatatattataactttcaaaaattgtctatggattactctatttcatctaattcgagaataagtcttatataatttttctaaattcatctcctcaataatttaacttaataaccttacagaatcatcttttggaatcatgtaatcaatatttagtggtagcttaaattgataattatcaccataagtagtataatcaatttgtgtagtattttgttttagcatacagttattatacaagaatcccaggttcttttgaacttgggatttatttttttatacaaaaaagagcgtagcactattttctagtgcgacagcctttttatttatataaccttctagttgtgtgctaattgtgtgcttttaagcaaaataaaaggaattacttagtccaaacataagtaattccttttattctattattttcattttcaaaattggtggagacgaggggagtctacaagtggttatttgattgttttgttggttttcgtaagtgtaggtatatagctatttagttatgatgttatactaatttttttggatattttttattatttatttttgtggttggggtattattggggtataattttctactttctaaaactcttgctaattcaataatataaatcaaactctcagttaagtttcttaatgaataagtaaatttacaactaatttagtgtaatctaaacttgtagtgcctagtcacaactctcaccccttcaataatttataactaacttagtgtaatttaaacctctctactaaaattacttccacatatagctacagaatttataactaacttagtgtaatttaaactgtacctgggtcttttatcttacttgtaagtgtacttctatttataactaacttagtgtaatttaaacattgcagataggtctgtgccatcattcgtgctgttacatttataactaacttagtgtaatttaaactgggatggattttgaagcttctatgtcaaatgtacaatttataactaacttagtgtaatttaaacgaaacctctctttaaaattattcatagaatttataaaatttataactaatttagtgtaatttaaacattgttgctagaaaacattaaaatacattacacataatttataactaacttagtgtaatttaaacggctggacttgtaatagttgtaactaaaattagtgaaatttataactaacttagtgtaatttaaacgggtagaatgaatcaaatagcaaaagtactttccggaatatttataactaacttagtgtaatttaaaccccaaataaaactatagtaattacaacacttgtagggttattaaaatagttaatttgcagtgaggcaccagtagtgtttttagctaaaaacaaaaattcagttataaaccttgccatcactaactcacagccatttacacatatttttcgctcactgcaaaattattctattgtaacatataaaatttgtagtcgatataaattataacaaattctcaataaaatattttaattagttatactataattctcttaacaatcaaatattagacctagtttatcattataactataacttgtaacaactatatctccacattcataaaacatctttttattataattgtatctttttacagatacatttacaaataatgaactcgcttctaaatacatttttttatcaatatacaacttgtactcttctaaaagacattcaggcacaacactaatagtatcattatttaacatatcattattagcagatttattccatacccctaacctcatatttttcattataatctctaaagcaactttatgtttattatatttatccatatctatatctaaatagacattatctaaataagatggaactttactctcatcaactatagaattatcattatgtattatatctgatattactatatcagtcctatttattatatcttcatcatatatattaagctttctatcataatcatatatataaatattgctcaactcagcattatctccccttctatttactctaccaaacctttgtaacaatgaatctaaaggagctaactctgtataaagaacatcataacttatatctaaacttacctctatactttgagtacctatcaataagaagctttcttctatccctttttctgcctgctctctatctctagtattaaatcgaccatgtattaatttaggattatatttttgaagccttccatataactcttgagataaatctactgaattaacacatattaatactctttttccttgcattaaatcattttctattttatgtatgctatcaagtattccttcacttaatctattcaatctatgtctaaatattaaatctttactatctggttcaataattgtacttatttgcaatctttcctgtattaacttttttaagcaagttggtatacttgcactcattatacatatttttacatttaagttttcttttaaatattttaaaaattccaatgtataacacaatactcttgtatcaaaacaatgtatttcatcaactataaatatactatcttttaattgtgatagtagcatttcaaatctcttacaagaaaatactgactttactaattgaaatatagtacatacattaatttgttttacactctttttgtatatctggtaaagttgttttatatcttcttcatcactaattttattcaaaaaatatggagctttactgtgtaacatacttacgcttatatttctattatataaattttcatataaagaatttatgcttgctgtataaggaagtatataatacactctcttacttttatattcattttgaactaggttactccaatacaatgatgttgctgtttttccaagacctgtcatagccattatcattatatcttcatttttatccatatttaaaactttttcttgtattgaattataacttacaccctttggtatactaaaatctttaatagaattaaatcctttatctatacttttaattcccgcagaagctatatggtcacaatattgcaagtaaccttttaataatatattttcaagttttctagtatcatcatttcttgctcttgatatttcctttataaatggtcttatatcttctacttcaatatctaatagttcctttaattcctttaattcaatttcataaatagaatttgttatttgaccctctagaaactttatatctttatggtgggttaatatagctaacttctgacctctatttaaatacttaatacttgctgataataactcatgtctaactcttcttgtgctactttcaatattatcttgaaagctttttactactttccctacatcatgacatacaattgcctcatataaatcatttttcatatcattagatatattatatatgctaactaattgattcattatgtaattcatatcttcattatgcttatctatacttgtcccatctgatttagctttatattcatataaattattcatgatatatcctttataaagtctcctttaaatattttaagtaactttcaaaagcttgatgtacatttgatattttcataaaatcatactcttcaaactcttcttctaaatacttctttatttgttccttttcattattaacttctatctcattaaatgtatcatcataaaatttatttattccaatccatatatcgctttttctaaattcttcattttgttctatagattcttttaacatctctacatctaagccattttctttgataataccctgaaatacattatttccccatgaatactctcccaatataacaaatttgggttttgtatcagttagatgatttgtcttattaccttctacacttaagtattctagtgattttaggagagcttctattcttttaaacttttcttctttatctaacttttcaactccaattgatttagcttctaaagttgtataatctctatgctcacttgctatatcagatatatcatattctcctatctttcctatattaagatttgctatatttgtatgtacccctgaatatacctcaacttgatatggcatactatctcctgtagttccacaaacattccactcccattcaacttttctatttgatacatttattaaagagttcatttgccatcttgactttctttttttagttatatttacttcatatttctttttattttttttatatatttctttttcttcatctgataattctttgtatacatcttcttctatagataatttttccgccatcataaacccaaatatatcatctgtcgcatatttaaatgggtttggaaccaattttacttgtttcccatctttagttttaacattttgttcataaccacaaacttgttccataaatagcttttgattgtatttttgacattgacttgagattctacttctgctccctatttttttagtataagtagaattcttatatgaattatttttcttttctacttcactactacttccatttaatcgcccacataaaacttctattgcatagcctatatttaacattctatttgaatttttattttccattttaaccctccataatattattaaattaaacttactaatattaaatttttaatctgtctaaagcttcttatatcatccaactcaatataatcctctgcttcaaatagtttttctccagttttttcataatacatttcatttaagttaactaaccagtcctcatatgcataaaattttcctaacattttaagctccttatatattttgtctatatctaagtcactagtttttaatttatccgttaatttttttattatatctattttgacttttttcaatacatttacctccctgtttaaaaaaataacaagttcatcaaaattcttttgttctttctcatccattttttcttccttttttaccctatatacttctctgagataattgctttctaaagtaccattcaagatatacctatccaaatgtaacttttcaaagtttgatagtagtgctttttcctgtaattttattaataaattcacatatttattttttattctatttacctgaatatcctgagattgaccagagttattaaacatatattgctctatatcaccattaaataagttatatttacacactagactttctaataattttacaattgaatacttttctttttctttctttgctcctaactctacatcagttaaattttctttttgaatatggaaagtataatcttccataaattcgcttgatgtagaattgtataaaaaagcatacctacttactctacaattcagaattgaatacatagtcaatactaaacaatatggacatacattcaaaccttgcaaattattggagaaattataaaatgtatttgcaaccaaattaggcatataacttctccctatattgtattctttatcttcaattttgactttggccttatattgaccacataaactacaatattcatctccttgatttttaacaaaaccttttaacttctcatttaaagtaacttttccttttggttgagttagcgtagaattgctaaagcacatactttttaaattagagtatttttcgcaacttacaaattcttcaattttatcactcattaaatctatactattctctatatcttgataagttatatcattaatatctttgttcagataataagccaacacatatagaccattatcaacaaatacattgtaacttctatccatattaagccctcctagaagttatataagttagtaaccccattcctatactatttttttcacctaatccacaataataaattacttcttgcatatctttattagcttgtacaaatatttcaaaatctgtatatccaattataaatccttttccttttatattagttatatatttcttttttactgctaatacatcctcaatatcaaagtatagttcaccagtatattctttattatgtataagcttatacttatttcctaaattatcatgtaatgctttataaaactcttcttgcattggatttaagtatacttgtttcctactttttaaatcatataaacttgctacaataggtgaccttactttataaagtgttatattattaaaatttttctttgaatcttcttctatatctgaaactttaaactctatattattcaatttaaatactttacatttaataaaaccttttataatattattcaatatatcatcatatccacttaaaattaatttgatttttgtttggggatttaaatgtattccctcttttaaatacttagcattttcaaacataattgtgtaattaaataatttaaatactttcttatccaccttatagccttcattgtgaagacttagtgcttttcttttatcattaatttctatagcttcatatatccttttcattagctcatactggtaattgtaatctaatacaacttcattatccactgtgagtatcaaatgtcttcttactaaatgcatttaattactcccccttttttccatttccataaaaaaatattctgttgctcatcttcatcataatatttaccatattcaaactcatcattttctcttaccattgaagaatatatatcataataaccttttttttcattatactctgtcaatgtatttattctttttatcattccatctccaatattaatatctgtatattgattgtatccaatagcttttttatctattagatttacttcaatttcacttaaagataataccttcgctaaacaattagtcttacctaaacatagcggctcattaaattctatatttttatctatgttagtatatatgataagtttaggattaattaggtattcaatgggacatacatcagtttgaaatctatcgctatctgtcaatgtttttacatttggattgatttctttatatatagtctgtaaatctttaaatgtaccatcatgatatataacatatcctaatataaaatcatctatttcttcaccatatatattttttaaaattccgacaactgttgatattggtggaatttcatatgttctttgtatcttgctatgcataggaattttaaagtgagccatatctccaattatttcgattttatttaatatcattttatctcctcaaatatttagttaaaatactccattttatttataaaattagacattcatttataaaaacctttaatttttaccattattttcctaaaagtaacaaatatataacttaattagattattttagtgaagtttctaaaaactttacacttaccttaaatcaaggttctccttcaaactttcaatatagtacttgtaattttctaaaatatttctatgtatgttcatttatttaacaataaaaatacatttctatggattcatcatacatgttagtcttaattaattttcatcaataacttaagatatacctaatcggttagactaatatacctcaaatacttaatttataaaagtagctgttatactttagcaactaccttttcctaataaattttttgattttttatattagtatttgttgttaactagtttagaatatatactttatacatctctgccacacataagcattatttactatcttttataatttgcttcaaatcatcaatactcaaaacattatctttcttcctgtgaatcattctatgacaatttgaacatattggcaccaaatctgttttgggatttatattgctttcttctccaacagaacttaatggtttaatatgatgaatttctatgtatcccttacctctatctccatacgttttttcgaagtcaaacccacatacaatacactttgtgccatgatattttattgcttctattctatttctggggttacgctcatactgtttcccataaacatatttaactttcccttcttttctaatttcagtttctaattctatattaatagtattaatgttcaaaggattatcttgacttatctcctctaatacatcgtcttctatttcagcagtaaaaatgaattctatgttaaaattattactatcaagttttatgaatcttattttaggtaaatttgtttttccttctattttattttctaagaatttctcataatactcagaaaatatacttcttagtaaatctctaaacttagatttccaaattattctacttcttggattctctaatttatccatctctataactgcactataataattatcattatatttaaaattcacatttttcttttcattctttcctaaattatttatctcaaaaaaatatcttatttctattggaactcctgtcccattatgttttaatgtagatttatcaattgtttttaaagctattttctcatctaataactcccaagagtcaactattataggatactcatttatatttctaatttctaaaagtatattaataatctgcttgaaatgtatctcatcttccttaagaacttcaattgctttatctattgtgtatcctgtaaaaatacctttatgatttttatttattcctaaatgatgcactatacccattgattgataacctttactttgttttgatgataaatctagtatctcatcatctatctttctattactcatattatttttaaataaataattataaactactttgtttatttgctctgatgagtatttattaaactctctttttctatcattaggctctaacttaggtattatcatattctcctcctcaattgattattttagattttaataaaattattgtatcatatatttattattaaaatatattgtgctatttatcaaaatacgtaaatcctacaatgtcattgattgcataaaaataaaagagggcatacttatcccctctttattaaatatatttattttaaacaatataattaatatatacttcacttaaaatattctagtacaacttattaataatctcgatttactatttaattattctattgagatacacaaattaattacttcaacaactctattataaattttgctcctgttttaaatcctaatttataactaagttctctttcaaattctattaatgaattaaacaaatcatttaattcaaccaacagatatttcttatcatcttccaaatttatttccaataactcattaatttttttaacctctttccaacattcaatataatactcatctttttctaaaatacttctatacatatgttcatttatccaataatcaaaatatatttctataatttcatcatacattttagtacctccttgactttcatcaggtacttaatatatacttaagttgctaggttagtgtacattaagtacctaatttataaaggtagttgttatatttatatggcaactacctttttctaataagcatttaaatctaaactcaatatattttaaatctctattacatctaattaagttttatatatttaccattcaatacttcttgaaacataatttatctattacttaataaatcatgcttcttttttatatctcttgtatcttcttacattcttcaaaagaaaacaaatttcctatataccaatatggtctaaatcctgactcaccatctctatttttggcaacaataatctcacttaaattagcaccaaaacctttttctcttcgtctcaactctcttatatcctcaattcccattgtcttgcaataattaagagcctctttttctgtaggtctatgaatatatataactgaattagaatccatatatatctgctttgagcttctcattactctatcccctttaggtctttcatccttcaattcatcatttaattgagcaagctgaataactggtatattaaaatctaaagtaatcttttttatttgccttgataagtcagcaaatttagcttctcctacttctttaccttcataatccaaaatttgcaaataatcaattatgactaagctaggcttagtactctttatttctctctttatccctgatactgtatttacagagtcatttatataaaggttattttcttgatttattatgcttaaagcttgtatatatttgactatttcatcatcatttagatttctatttttcatttttacaactgatattccagttagtgaggctatatttctaaacagaatctgtatatcactcatttctccacttataaaaagtactttctttccttgaaatattacatttctaagtatttgtaaagctaatgctgttttcccccttccacttttggctgctattgtagttagttcacctccatataaacctcctatagtatcatctaagaactttattccagtcttaataccttcattcatttcatcatttatatattcaaaggctctctctgatatggctgttatacttgaatccttttttattaatttctgattggctttatttatatcattttctaactgatatataagagtattatcatctatttctccaagattgaacttattgaatttatcaattatatttctatttttatatttttcaataactatactgacataactcgtgaaatttgatactgttgggactattgttgacaaactggtaatatagcttatacctccaatattattcaaatgaccttttctctttaattcttctgtaagagttattatatctattacttcatttctcttatttatttcttttatagcattaaatatgtatttatgttcctcatgataaaacatgtcttcatttaacatttgctctaactcttctactattgttgagtctaataaaatgcttcctaatattgattgctctgcttctgtatttttaattaagttgtttgaattatttataatataacctccttaccactttaattgtgaatcatctggattatatattcctgtctctttatttatgacaatttccttgctatgataattgccctctagtatcttggtaaaattacttgaattcattatccaatcaaaatttgctttccatcctgtattattatttccattcagaaaacttgttttactaactatatttataacctctaatacagcttctttatcatattctcttattattgaatttattctcctctttcttgtgtctgttagtttcttgacctttgaaagttcaatacaagttgagttaaatttgcttataatttcactatatataatattattttcattctttatattcttgattgttgttgattgattgttaatcgtctgttgattaggttgttgattttctatgttctcttggtaaagctcccagttttcaatagttatgactatatatttgtttgttgtttcgtatgttagaaaaccagcatttttaaaaaccaacaaacaacttctaaccatttgataactaactcctttaccacatctttcagctattttgctataagaagaaataaattgtccagactttatttttatccttttattatctataaaaacatgattttctttatgactagccataagtaatagagttattaatattacttttctttctggtttaatatctttccaaattgatttatccaacaactccctgtaaagctttatccaccctttattgctcaattgcaaacacctactttaagactataacttgataccatttgcattttcaataaaccaatcatccaatttgttttttattatgtatactcgattatttatccatatacaagggaaacctttatttttagagtgacataactgcctaaattttgattctcctataggataaagcttagatgcttctttacatgttataagttcagctttatttcttttcgcattttcaataattttatatccttgctttttttcttgtgcttcttcttcattctttacaataatgtttaaagtagcttgtaatgtctttaaaacttctaaattattattctctttcatattttactcctccttactaaaaaataattcttctactgttgtatctaaagctctagatagtttaatcatcaaatcattgcttggattattagccttacctgtttccaagtttgacaaataatatcttgatataccaactctatctgccagttcttgttgctttaaaccttttttaatcctaaatatttttaaattgattcccatactttttcctccttttttctagtttacattcgtaaactttacattttaattataatgtcgacatatgtgtgctgtcaataagaatatattatttttctgttctcatttgtgtacttttgggatatactttatacgaggtgataatattgcaaattggaaaaaacttaaaaaagataagaaaacaaaaagaactaacacagattcaacttgctgaaattagtggcatctcaagaaatgctctaataaattatgaaaatgataaaagaatacctagtatagataccttatcaaaactcgctaaagctttaaaaattgaaaagactatcttttattttgatattgaaaatgaagtaatgactaatgaagatgttttatattttttacagtctttattcccagaagaatactattcttttgatgaatttttaaatgctatttcaaatcttatggaagatgatgatattaggattacctcaagtttattgctaggtgcttggtctgataaagaccaatattataaacttggtgaaaaattagaactaaatgaaaatcaagtttataattggatactttcagattgtgtatctaatactgaattagatttttcattacatcctgatgatataaaagaaattattaaaaatgatgttcttataaaacaatcaattgatgaattattagatattggtctatcagaagaaaatatagaagcaatctatgattactttagtgaggcaacagataatgggagtaacattcgactaaaaaagttaatatctcaaaaagaaaatatgactattaaaaataatgattactttaaattattacaagaaaataatgaattaaaggaaaaaaataaaaagcttgaaaatacacttaaagaaataaaaaaactactaactaaaatataaaataatatcaatactatctaaagcaatgataaaaaactacaaatggagttacaattattaataaagcatatatgctaaaatacacatataaataccctactaatttattttatggagataaaaaatatactctaacatacattaaaagaattatgagtaagttagtatatgatatagataatctagaaaataactcctttatatgtgtaaaaatacaatcattgtttgatgatatatttaaggtggaattatgataaataatacaatcggagaaaagattaaacaatataggaaatcgataaatatgtcaaggaatgagctagccaacaagattggttgttcagttcatgctatagctaaatatgagcaaaatcaaagaatacctagtctagatatgataagaaaaatatctactgctttatcaattgccataaataaactcattgttgaagaaaatgatttagatactttaacaaataataatattaatttaaaagtatttgataaagagttggatttagtagttcacatattagaaaattatggttatgatataaaaacagactataaaaaaaagtttgaaattacagataatgcagatacaataaaaccaattagcttaagcttctctgacttcaaagacttctccaaaaatctaaattgggtgataaatggtcttgttgaaaattttatacaagaaaactctaatggtcttattgaagatgaggatgaagaatattagtattgcacattttcaaaatatgggtttacctattaacttttatacattcatagttaataaataaaaattagatatgaaaggagctaaaatcatgaataaatcatatataccaaaatacacacataaattccctacgaatctacctcatggagataaaaagtatactttaacatacattagaagaatgataagtgaatttgtatatgatatgggtaacctagaaaataaccccttcacattcccagaagtacaaacattacttgatggtataacagtaggtggacataaattaagtgaccaaaatcaaatactaaatataaaatcatcatgggattatataataaaattaagtaacaaagaaaacttatctttaaataaagatacaatttgctctatacataaaatagttgcaaaagatgaagctctaattgttggagattttagaaacggtaacataggtatagctggtactactcaatatgagtgcatagaagccactctattaaataatttatttataagtgacataagtatcataaataaaataactaaccccttagaaaaggctataataataaatttatggttgtcctattgtcaattcttctatgatggtaacaaaagaactgctcgacttacctcaaacctaatacttataagtaatgatataggagttctatcaataccagccaaacataaacaagaatacaacacattaatgctaaacttctatgaaacactagaagctgatgaagttataaaattcttattagagaaatgtattacattcttcgatggatataactataaatcatataaggagttgtttaaaaatggcaactaaaagagctaatggagaaggctctatcggaaaatataaagatggttggcgttctcgtataatgattggttataatgaagatggaaaaccaataagaaaagaattttatggtaaaactcaaaaggaagttaaagataaacttgatgcttataaaaaacaatattatttaagttctgatatttcagatgataaaataactttagagcattggttttacaattggttgtttgaatatagaataaaagatttaaaaccaaagtcatttgaaagatatgaaagcatctatcgtaattatattaaagatactgatttaggcaatgttaagttaaaggacttaagagtatctcacatgcaaaaatattacaatagattgcttgattccaataaaagtatacctactataaggcaaataaacactaaactgaaaacctgcttatcagaagctgaaaaacaaggtcttatacaacgtaattattgtactatggtaaatataccagttgagaaaaaggaaaataggcttgaaatattgactcttgaacaacaaaagaattttataaaagctatagaggggcataaattagaagtattatttttggttgctcttggtactggacttagattaggagaattattaggacttaaatggtttgatattgattttaaaaattctaatttaacagttaaaagaacccttcaaagaacatattttatagataaaaatggaaatagagagcttaaagtattagagcaagaaccaaagacatcaaattcttacaggactgtacctattccaaaagatgttttaaataaattgaaagagcataaagtaaatcaaaatgtggatatattaaaggctggagaattatatagaaatgataattatgtattttgcaatgaattaggtgtccctatagatgataaaagacctttaaggaatttaaaatctatattaagcagcttagatatagaacctataaagtttcatggtcttagaaaaacttatgcaactagactttttgagaatgatgttcctcctaaaactgtacaagttttaatgggtcattatgatatatcaataactttaaatatatatactcaagttatggaagataagaaggttgaagctgtagaaaagttggataaaatattttcattgtaaaaatcaaatacataaaaatactatgatttcatatagttaattacaaaacccaaataaggatacaaattaattttatattatcttgtatccttaattcgtatctagttttaactatttatcttggatagcctttatgatacattaatccattttctagcattaattcttgagccaagtatatatgacccttacagtgcatatctgatacaccctcacttataagtttatatgtttcagaagtatataaataatccatactttcttccaaactcttgcctgtctgattagaaaattctaatataatttttttatatagtatctgtaataatgttttatttgcttccataagcactatacctcctcttcacatctaaactttaaatatttatctattacattttgattagttatacatatttgttcatttggcttatagtattttaatctttttaaagcttcatctttttcaataagattatcttgatacagttctattgtattgtaaatcttatcatcagcaattccacctattataacatcatatttcatatatacatcactcatatttctacattctaatataaagtcaagccattctaaattataactattgaagatttttaccttgcagttttcttttaatttatcaatatctagagaatagctatttaaatatgcttttttaccccttttcttaaaacgttctatccagttaattgcctgtgtttttatactggttacatagaatccttttccaaaatctaaagaatctcttaagaagataatattaggcgtttttgccacacagtatgaatcatgatatacaattattacatcacgcccttttcttcaagcacttgtattaaatcttccactatataacttttactttgagaatgtagtgcttcatagcaaggtattatatagttatctaaaatatcagtatcatgtttaagaagtttataaactccttctgaatctatattcaacttttctgctaaagcttcaatgcaaaaaatagaaaattctagttttctttcatccattacaaacctcaactcctatccacttatataatatatatatttttattaattaataacttaaaccatcttatgtttataaaaatattatatcataaagtagatattaaaattctatgttacataatatcataaacaaataaagactagcatttccaaatatttcatcatttattttttaactcagggaagatataccacttgaacaatatcctcaactgatattttgatatattaaatttctattataaaaattttattctaattataaatcatatagtaatatacattcattactttataatttgaaacctcttacactaataaaatttgaaagtgctcattattcaatacaaacatgcctaaaattatattttaatttttacactatcaaaaacatatatattaaatttgacccacttaaatacagtaaattaatttctacaacatgatataattaaattatgacaaaagactttgatatttataaaaactttccaacagatgtctcttataagatttttttatataatcttaaattaaaaaactcattaatatgcccctattgttattctgataaaattagtacttataatgatttatttcattgcaatatttgcaatagtaagttttcaattacaactaataccattatgcataaaactaaactagactacagaaaatggctacttgctattaatttatttatatttgatgaaaatattagctatagaaaattatcaaaaaatatcgttgttaataaaaatactgcgtacaagatgataaaaaaactcaattatctatatacatattttaaaattgatattattagtcttataaatactaatttatctaatgaagagatactaagtaatatcttacttattaaaataaaataaaggatggtgttaaattggaatcaaaagaaaaaagtatattgagagcaacacattttggtattataaaaataggtgaaaaagatttaaattgtgctgtactagaaaatggttcaagaatcataaataaaagtacagtattcaaagcttttggaagaacaaagcgtggtagaaaaaaagatgaaattcgtgtaccttctaagcctaatctaccaagttttattgatgcaaagaatctatctgattatatttcagatgaattagaagatatgcttataaatacaataaaatataagactaaaaacggaagaattgtggaaggttatccagctgaaataatacctcttatatgtgatgtatatttacaagcaaggcttgataataaattagctgttcagcaagaaggactagctatagcaagcgaaattttagtaagaagtttatccaaaatagggattgtagcattagttgatgaagctacaggatatcaatatgatagagatcgtgatgagctgcaaaaaatattgtctatgtatatttctaaagagtttttaccttggacaaaaagatttcctgatgaattttatagacaaatgttcagattaaaaaactggacataccctagaccaagttctaagagacctggaatagttggaacatacacaaataaatatgtttatgatttattacctcctggagttaaagaagaacttcaaagagttaaccccacagtaaaacctgggcaaagaaaacataaacatcatcaatttttaacagaagatataggtaatgatcatttaaaaaatcatttattaaaggttataaccttaatgcaagcatcaaaagactggaaagatttcaatgtgctttttaatagagctttcaatctacctgtacagctcgaaatcgaatatgatgaataatagactatagcctttaacaacgctttaaatacttttaatttatattataaaaatagaattaacttatatcataaaagtacttattagtataggtacttttatgatatattatttaaattttatatataatatattgtctatatacaatagtcttgttagtattaaacttaataattctatgtgtttattatcttaacatttttcaattccttttttacatcttatttttttaaatacaattaaaaaatttaaattagcatcccacatagataataaatttgttctatacttatacataatcttataggattctgtatatcattataactagtaattactctaatagattaagtagcacttatatgctttaaacttctttatccttttaatcataagtttaaacaagttatatatttcctagattgaaataaaaagcataatataaaaacaattcatcagtataaaatatttattgtattatcatcaaattcactatatctctaaaagtattctttatatgttccatggattaatcaaatgcaccccaatataccccaaaaaaatctctttttctgtggttggggcacggttggtggatttcatctccaaaacaaaaaacactagtcaataaagactagtatttccaagtatttcatcattcttttttaaaaattggtggagacgaggggagtcgaacccctgtccgcaaatcttttccttgctgcatctacatgcttagccaacttcactaatatctcacctcacatagcgccaagtggcaggctctatgcttagccagtcccaattaatctacttcaggtcgagacacccctaaagtagttccctgcataatgacgtccagtcttagtcggcaggaggactaagagggacgagcagcaactaggctgctatcgcgaaattatcgtctgcgtttattttaaagttccccagtttttacgtgacccagagtaacacgacatgcagcctcaagttccaaacccacgtcgaaacctttacgcccccttgagtagtttatagtccagtagacttttcgcaaactttatcaccatttttattaaatttttaatgtatatataatataatacttttaagaataaaaatcaatgttatgttctagataataaagaattttattctaaaaaatacagttttatctagtttaatacttacctgtcatttctctttctatacgtctttgtgcatctttcttagccatatcttgacgtttatcatatagttttttaccttttgctaaggcaatctctactttaactttaccgttttttagatacaaactaagtggtataagtgaatacccctttatagtagttgctccaataagttttcttatttcatgcttatgaagtaatagttttctaactcttaaagaatcaacattgaatatatttccttgctcatatggacttatatgaacttgttttaaaaatacttcactattatctacagatgcaaatccatcacttaggttaactttgccttgtcttattgattttacttctgttccttttaattcaattccacattcataagtttcttctataaaatattcatgtcttgctcttttgtttgttgctaatatttttttaccagccatataaatctcaccttctttgttagaaatttattccataaatgttagaaatttactaaatatttaatgttgccaaattatttgactaacttgtatgataacatatttaggcattttagtcaatatttcactgatatattaagttagttaggctatatataattaagtaatataaagatatgaaaatagctaaaaaactacttcgaatatacttaatactaaactaactttaaccagtaacactgatttctaaatttcaaaacaaaaatattacatattataaattttctatcttctatcttctatcttctatcttctatcttctatcttctatcttctatcttctatcttctatcttctatcttctatcttctatcttctatcttctatcttctatcttctatcttctaaataattttaacatgcccataaaatataatacccacaaatgataaataatactcaaaatatctattgaaataactatacatccttaaataacttaacttaaatctaaacatttcaaaaacttcttaaaaatatgtaaaaatttgatgataaagtagcgattttttcaaaaaaaatgtaatatagagttatatcttataatattttagagataaattttatcatagttgggagaaatttgtatggatttaagcaaaaaagtaaaaattttagaaaatgcatcagatggcaaaagcgaatttgaaatattagaatttgaaaaacttgagggagcttctagcccattaatggcaatgggattatattttgctagagaagctggtttgaaagctagacaaattaagataaaattaaataattcatcaataaaaacagaagctggtgcattatactattataaaggaaatatatcttctgaaactaagattggtggtgttggaggtctttttaaaaaaggaatatcaggagcacttactaatgaatcaatgatgaaacctgtatacaaaggtactggagaagtttatttggaaccttcttttagacattatttatttatgagtcttgataatgattctataattgttgataaaggattattctattgttgctctgatacaatagaagtaaaagcatttacacaaaagaacttctcatctgctttacttggtggtgaaggcttcttccaaatagaattaagtggtactggtgtaatcgttctggaatgtgttgtacctcaaagtgaaattgtagagtatgaattgaaaaatggagaagaattaaaggtagatggtaactttgcaatagcaagaacatctggggttaatttttctgttacaaaatcagataaatctttaattggttctgctttaaatggtgaaggtttcttaaatacatttactggtaatggtacagtttggctagctccaactcaagtaatgtatgaaaaactaagttttggagcaatgcctactaatgataatatgaataataaagtttctaagcaaaaatagttgttttataaatatttattaaatcattattgattttataaagtcactataaattttattagattattattataaaatcagagtgtggaaatgtttatgtgtattctttaaataaaaatttccacattctgtaaggttattatacttgatatataaaattcaatttaggaacatagtctaacatttataaacatattaaggtaatgatttctcttggtaattattctcatatcttattctttgattatatttatcttattcctagcccttatgtcatattatatttcttatcttattatttataattagcattaacttatctaaaatcttgtatttttttaatagtaaagtttacatctatattaaaaagtttacatctatattaatttcataaaacaatcaaggtagtcaagagattcaactttatttgattttaaaaatttaagtgaatttgttcttatacacatctttttaaaattatatctgtagaaaatatcatttagagctataattaaattattaaattttagaaaatttattaaaaaatataagttaaattaatatttttaaagattcttttttataactactagaatactaatttagtagttattgtatctctaaagtttaagcatggatagatatacatttgataatttgcctataatttacctactacttggagtattggagcaaatacaatatattaataataagttcctaaaaccaataaattaactaatacacataaagatattgatgttgattatacaactataagaaacagatttaacagaatttaatcaagctaagaaattacatatatcgtgatgtttttgaattagaaggtaattcaaaattagtttatagtcttctgtgaatccaataaaaagtacagggtacaagaattgttagtaaaatttttaaagattttatggatagatataaatagttttacttattttgtaaaatttaaaataccattaattaccttaaatattttaataggaggacatatgaatttaaataaagttaaatttactgaagaacatgctattgaagttactaattggaaatatgaaggtaaatattcaatatacaacctacctccatgggaggaaattaaaaagaagaatttttcactatcaaaagaagataaaagaaaaaattttataagttttataaatgacaataaagaattgataggttttataaacttattggatgaaggaagttatgtattctttggtattggtataaaaccagattattgtggaatgggaattggcaaagaaataattagcctaggattacaagaatgtagaaataaatatagtactaaaccaattgtattaaatgtaagaacctggaacatgagagctgtaaaatgttataagtctcaaggatttaaaatagttgagactcaggtacagaaaacgcatttaggggatggagaattttttgttatgaggtatcaatagtttataacactagtcatattgctaatatgacaattaaaatgaaaaaatacatgtgtgtatgtcatagcaataagtgtctttgaaatataaatttgagagcctttgataaaattcggtatacatatatattttatactacagatatataaatctatctacatacataaagagattgtaagtaggtttgtgtatataaaaataaatttatatttcataaatgtactttttatttgtattacctttattttatctaagctctcattttattacctaatcttcctttttattggttttattaagagagatgcaattatcaacacaacacttccaagtatcagccaatatttctcatcaaaactaccttgactcatagacattataaaaaattttccaacatacttgcctttagtcatcatatttaaaattaaatatcctatagatatcatgtaacctatgattgtattattaaataaatttgagaaaaacattcctaaacttcctataaacatagctgatgcgaaacttccaataatatactcaactactggaaaattacatccaagatatattaaaacatttacaaaacctatgattaataccactatacctataattgacatcagtatcctaattaattgtacaataacttgagataatgattttgaagatactatctcatcaatttcttttgattgctctagcgaaaatacaggtaccaacattactatccctattattgcaacataattttctaaacatatagctgttgaaattctgtctaaattagctactccttgtattagaggaatcatacatagcaatataattgaacatattaaattagttaaagtgcttaatttgaagttttcttttattagaactaaacagttttgaaaactttgcccaaacatcaagattcccccttcttttttgctcatataagaatatagctaacaaaacaagcaccaatgctcccaagcttatcacaattctattaatcataatttgattgaagttttgtataataatatccccatttaatacactattatgtcttatcattagccccattgttgaataatcacctttgagtcctgtagaatttatactgtaaagccaccaaattaattgcacaataattgctactggtgtatctgttaatatagtaatactcattcctacagctgtaactatcataagagttggtagtatccaccataatgtatattttataaatgctaagttatcaatagatatacctttatctttagcaaagaaaatcaaaggaagtaaatctttcatacctaaaattaatacaggcaatatcattataaagacaagtgcaaaatatcttgataaaactattttgcatgaagatacttgttttgaataaataatctctctcattcttgaacgcttatctttaagtgacataaaaactgccacaaatactggaaatatacttaaaactatacctatataatcgcaaaaaattcttgcatacccattactaactttatctttttgtattgtatagttgtaattcttcatagcttcatcataggtaactggaactactccaaatctttgtaacttgtcaaaagcatatgcagaccctcctcctaaaatgtcgtctactctttgcattatttcttcaaatctttcaagagatactttagaataatctatttttatactttcatcagttttccaaattaaatttatttcgctaatacttttaccagttatttcttctatatatttttctatggtcttcgttttattttggtctaattttatatacttaactacccctgttggatacgttgtatatgtgtttttttgatattctctaattaggtttatagttgcatttggaatgaccttttctgttttcatagattctttttgaccatatggatattgattgtgtacagagtaatattcgtcaatattctctactttttgtggagcaactaatggatttccatcattaggaatatttttacttacatcatttgaaactgaacttccaagttgagaaatatagaaaaaaactaaaactacaataaaaatataatataccatactctttaatatatttttacattcttttataaatagattcatatattatctcctcccattataagcatatagccatcttcaatagttggattacaatttactgctgtctcaaaaggtttatcatctgatataatcctaagtatagcctttccaccatgagtcaacattcctataactataaatctactttttatattttcaatgtcttttttatctacttcaatactatatactttcccttcagctagttttgctaatgcttctgttgagccattgtatatgacttttccactatccaatatagctacgttttcacatgtagcttctatatctccaacaatatgtgtagataaaataacgattctatcatttgcaatttcgcatagtaaatttctaaatcttatacgttcttctgggtcaagacctgctgtcggctcatccactattaaaactctgggattatgaattaatgcttgtgctatcccaagccttctattcatacctccagataaagattttactttcacattttgataattagtaaggtttactttgcttaataactttgctataatttttcttctttttcttagtggtatatccgataaaactgctaaataatccattgctttatatactgtcatgttaggatacattgaaaaatcttgtggcaaataaccaaccatatttctaatttccttagtattctcaataggaactccacacatatgtattgaaccttctgtttttgataataaagtggctaaaattctcataaatgtggtttttcctgctccatttcttcctaaaagaccaaacataccactgtcgatttcaagatttatattatcaagagcttgttttttcccaaatcttttactaagattggatactgctattttcatttccatatataaatacacccccagaaataattttatagaattttatttttataaatttttactgtattttcataataaattctaaaacttaagatattatttataaatttctaaattttttctaaagattttaatttttctgtttttaattaaattaaagtatctttgtttctgaaattttttaagtttatgaagctataatttaatatatatttattttatttgtgagtctatttttatatataatgaaaaatgtgataagtatccaaaagaattactggatataataagatagggtatttagccttttaagataaataaaaatatctgcaactatatattgcaaaaatttaaaactaatttatatatgctaatataaatatttataaagacataagacaaatttacctacagatttaaatttaacttatatattttaaaaggctaatataatatgtattttcttctatacaatcaaaaggcttcatatctaagatatgttatgacactaatattcacaattttttagtaattatcacattataaaaaatattacagctagtccatcatcagatgcttcttgtataaactttttaagctcaattagatttgcccatacatattcaaaaaaatcatcttcactctcatcattcataacaggataaatattattttctaacatctcattaatattaaatctttttctaaatgcttgttcttccaaactgttcattgcttttgatagtttttttacatcatttgctgtaatcaacatgacaggaaattctccatcaatttccataagtatgtttccacttagtactaatttgctaaatatattctcatcatctccaccaaaaggacaacctgtcaaagtaaagtgaatggcatgccatgctttatcaatattgatagtactattttcgttggcatcttcaaaaacaaaatcttgtaaattttcttctgcttgctgtaatttaaaaacattctcttcacttattttagtataacatcctatcatccccataattacattcctcctaagtagcgtttttttaattgtaacttataattaaacttagttacaataaaatatattgagaaaagtattatttcatcttaaatttaaatacctatattatcaactaaaattctgtgtttatagcgtaagtattattattttttcctaaaaattaaatgaatcagaagttctataggcaatattgactataaataagaactattacttttaaaaaaaatttaagaaattatactgtagaatcatgctctacttattagcttcaaataaaaaataaatcatgttctcaaattaaataataaataacaataaatttaaattttaaactataagagtttctgaagtgttaataagcataccaataattatatgtgtaagaatttgatttaatagatatgaataatttttacattaattataaatatattaacctattattataaattctataaaaagaaaagttatcttaaataaaaaataagtgtatcttaaattttaaatgatacacttatttttatattgaaattatattttttaatatctattcttaattaggtatttttaaattatctgtttacattaaatatctcttaattacttatctttcagctagcttcttctattaaatgtttctcaattacttatttttcaattagccacttctattaaacatttcttaattacttatttttcaattagccacttctattaaacatttcttaattacttatttttcaattagccacttctattaagcatttcttaattacttatttttcaattagtcacttccattaaacatttcttaattatttatttttcagttggctttttctattaaatgtttcttaattacttatctttcagttagctctttctattaaatatttctcaattacttatttttcaattagctactttcattaaatatttcttaattatttatctttaagttaactatttccattagatatttcttaattacctatttttatcatttattttatagagtattgtgcactatatatttatacatatcataaatactacaacttgttatctcttattttagctgttttatctactcctctattttttcaactatctcaaagtcaatttctttaaaatctacattaacactttcaacctttatcttaacaaggtctcctatcttatatgacttcttagttctttctcctaaaacactataagaactctcatcataaatatagtaatcatcattcatatttgcaagtcttatcaatccttctatagtattatctaactcaacaaatattccaaatgaagttacgctagatacaacaccctcaaattcttgaccaactttatccttcatataaagagccttatagaaatcatgtacatctctttcagctaactctgcctttctttctttctcggatgattgaacagatgcataatccactatagtagtaagctgttcttgtctttttccacttattttattatttaaagattcttttattattctatgaatttgaaggtcaggatatcttcttattggtgaagtaaagtgacagtagaatttagctgctaatccaaaatgtccactacattctggtgagtacttagcttgttttaaagaacgaagcattatagtactgatagctccttcttcttttttgccctttattttctctattataccttgtaatgcttttggatgtacttcctctttatcaccttttattatatatccaaatgtagatataaacttactcaattcttccattttttccaaagatggtgtctcatgtattctatacacaaacggtattcccatccagtaaaaatgttcggcaattgtctcattacttataagcataaattcttctattatcttattagatattcttctttcatatggctttatatctacaacttcgccttttccatttagaattatctttgcctctgggaaattgaagtctatagctcctcttttttctcttcttgacataagaatcttagctaaaatttcagcatttttaaaatcttcaacaacatgttcaaaagtctttttaagtttttcatcatccttttctaatatatcagatacttctgtataagtcattctagcttttgaatttattacagattcacatatttcatgtttaaccacatttcctttatggtctatttccataaatatagaaagagttaacttatcttcaaatggatttaagctacatactccatttgaaagagtttttggcaacattggaattactttatctactaaataaactgatgtagctctttttaaggcttccttatcaagtttatttttctctcttacataatgtgtaacatcagctatgtgaactcctagtttgaagtttccattaggtaatacttctattgatatggcatcatctaagtcttttgcgtcatctccatctatagtaaatatgtttaaatctcttaaatctcttcttctttttatctcttcttgaggaatctcaacagctacagcttctgcttcttgcaatactttctttggaaattcttctggaagaccatgttctcttattatagaatctatttctacgcctctttcacctttttgacctagtatctctataattttgccttctggttttctatcctcttgtggccatactgtaatttcacatactaccttatcattatctactgctccactaaaatgttttttaggtatatatatatctttagtaaatttcttgttgtctggtgttacaaatccaaaagttttacttgattggaaagtacctactattctagttatttctctctttattacttttactattcttccttctgctctcttttcttcagttgcaggtactactatttctgccataactctatcgttatgcatagcaccatttatattgtcacttgagataaataaatcctgtgtatattcaacatcagattctacaaatccaaaaccctttttgtgtgatacaaattttccaacaaagtatcccatttgattgggagatactatttttccttttttagtaaagcagatataaccatcttcttctaattcatttaaaaaattataaaacattggcatttctgatgaatgtatatcaaatatttctgctaattcttctttttttagaggattatatgcactttcatttattaatcctagcaaactttctttaagtcctggtatcatttttccctcctgttttacttttcattatattattatttatattgtcttttatatttcttcagataaaacattttttacttatcacataattttctatattttcttattattattacaagttaaaattacttatttatatttttgatttaatgtaagctttgtcatactaacttcaaacaaattatgatgttttataaattatttgtaaatatcattataattacttaagttattctttatcataattgcttaaattactctttatctcataattatacaccatcaaataggattggtaaaatattcatctcatataagtattactatataataatttattctattagtatactcaaatcatgtaaaatttatataactcaattaattttttaaatacaactttataatataaaacttataataaaagtaaatttatatgttaaatgaggttgattttttattattttttatttatgctagtactaaagacttgcaaacgttttttgacaagtctttattttgtctaaattaaacaaacttttttacaaataaatacataaaatttaaactaatctatttattggaggagataaaattggaagaagtaattgcaaaaattattactatagaaaatggattcaaagaaattgaaaacattgctaaaaaaattgtaaaaaataatgactcaaaaaagtgttattatctatcaatctacttatataggtcagaatattatcaagtaagagaattggctgtgtttatacttggttttatatcagtaactatttctgaagctttgttatttttaaaagacaatgtgagtaaagatgaaaactggagagtacaagaaatactagctaaatcatttgattattattgcagtgaagtaggatatgaaaaggcacttcctgttataaaagaatggcttaattctgatagtccaaacataaaaagggctgtgacagaaggtcttagaatttggactagtagagactattttaaatctaatcctgacgttgctatatcactactttctagtttaaaagaagatgatagcgaatacttgagaaagtctgtaggtaatgctcttagagatataagtaaaaaatatccagatttagtaaaaaaagaattagattcatgggatatatcaaataaaaaagttgagtttgtatataagcttgcttcaaaatgtatcttggcaaagtaaaatggaggtgaacttatttgaaacttcgtgatgagtatacttgcccattagaactaacacatgatatgataaaaggcaaatggaaatctattatattatggagattacgcataggaccaacctccttatcaaaacttgaaaaggaaatcaatggtattaatcaaaagatgttacttgaacaacttaaagaattaattgaatttggtcttgtagataaaaagacatataaaggttacccacttaaagttgaatactcacttacacctattcgagggaaacaaatattggatgctttggctataatgcaagatataggaattagctttatgttggataatggtatggaagatattcttaaggaaaaaggtgttttaaaataaatagatacccacaaaaaagtaagtaatttaccattattttcaactggtatataattaaattatagatatattctattaatttattataataggaggtaaattattatgaaagtaactagtacaggtatagtaaatggtgttatagaagataaatacggtaaaagaggaactcagttcaatgaaggtggtatgcctacatattcactacctctaaagtttgaagatgctccaaagaatacagtatcctttgctgtatttttagaagataaagactctgttcctgtatgtgggtttgcatggatacattggttagctgtaaatataacaaaagatgagttaaatgaaaatgaaagtgtaacagctactgattttgtacaagggactactagttggcatggcaaactaggaggtcttgacagattagaggccagtgtatatggtggaatggctcctccagacagacctcatgtctatgaaatacatgtatttgcacttgatactatccttgaccttgaaaaaggattctatatgaatgaatttttcaaagctattgaagggcatgttttagatacatttacactaaaaggaagctattctaattaattaggtttactatagctaatcattaattaaatgctacatttaattgatgattagcttaattgttattagaatattttctgcactttatcttaatatatattttagttgactggtattttaatttctattagattattatcaatttatataaattgattttagcttaaaacttacttatctatttcagtttctattagaattattattagactcattaaaataaaagcattaatataactaataatatatgttaaattcattaactctacataaagttttataatctaaatgaaatacaataatctgcataaaattcaatagcttatataaaatttagtaatttatataaatattatcaatctatataaaatttaataacttatataaatttaactaatttatataaaatcttaaggagttgccatgataaaaaaaatagagcatgtggtcattactaataataatatagaaaattatatcaatttttataaaaaatttggtttttcatctaaagaaatgagcgaaaagtataaacttaaggctagaaatgttaagataaatcttaacataaaaggttataaatttttaccttatgttaaaaatttaaaagcaagtagagataacttatgttttaaaataaacacaaatattgatgagccaaaaaaatacttagaacaaaatgagattcaaattaagcgaggaattgtagaatgtacaggtgtctttggtaatatgaaatctatttatttgaaaaaaactaatggaaatttaattgaattatcaaatcatagaatcacggagagtaaaccttggaaaatttaatcctatcaataaatgttgttcttcctttgtttctcacaatgtcacttggatatgttctaaaaaaattaggtctatttgatactcatactttaaataaaatgaataatgtctgcttcaagtctttcttgccattattattattttttaatatatacaatacagatttagatggttctcttaattttaagcttatggctgtagctgttataattattttttcaatcttcttaatcttagtctttattattcctaaaattgaaaaagataataagacaaggggtgcattaatacaaggtgtatttcgtagcaatttcgttatatttggtattcctgtgacaatttcactatttggcgataagagtattggagtcacatctttattaattgcagttattgtacctatgtttaatgtattatctgttgtaattcttgaaatttttagaggtggcaaagtaaatataagacatatgattaaaagcgtcttaacaaatccactcataatcgcctcttttataggattgacaatgctaattttaaatattaatatacctacatttttacacaaaactattggtgatatttctaaaatagctactcctttatcacttataattctaggcggatcttttagtttttctgctataaaggggcatataaaaaccattatattgggcgtatgtggaaaacttatacttgtaccttctatatttttaccaattagcatttttcttggatttagaaatgtagaattaacttcacttatgataatgttatctgctccaactgcagtttcttcatttacaatggcacaacagatggattctgacagtgaattagctggacaaattgtagtatttacttctggattttctataattacagtatttttaataatatttattttaaagcagaataatcttatttaatgatatttgataacacaaattggtattatgagaaacatatataaaattgatttaattgcgtaaaaacatattattatactatttttactatataatataactttgtgtatattatctcattaaacatggtgaaagtagtgttgctatatattttttagtttgaaaaaaatatataaatataaacaatatataaatacaaataataaatgccaacaaatagtcaatctataaaataaaaactggactaatcatataaaatcattagtccagcttttattttacgtactttttatgttgatgtacttttattaaaaactaaatttaatttttaaatatctagcaaatgcactaattaaataatggccagttattcaacaatatcactacttcttaactataagtaatgccaatgcatttataaaaaataatactgctgttatctttgtaactctagcaagaaatgcttgttttccttttggtttaaagtaagcttgacttccttctccaccaaattctgaaggtaaagcattttttgaatcttgaggcattatgctaattactagtaaaatccctagcactacttgcacacccattaaaatgttgctcattattgcccctcctatctatttattacttaaatttcattactctttagtgtatcacaataatatagtcatttcaagactattgaagtataaataacaaacaaaaataatatgcaattactatatcttttttgaataacgtacttctaataatttttttccaatatgtatctctttctcaaaatcatcacaagtaaaaccattttttttatagaaatttatagctctagtattgtcttttagaacccatatcgttatatatgaatatcctaaattgcttaatctatcaatgcaaaattgtaatcctttttttgtcacagatgttccccaaaaatcgggatggaaatatatagaatatatttctccaacacattttggagcattatcctcttgacttctatttaatgaagcaaaaccagcaggtataccattcactttaaaaagataatattcctcttcagcttttggaataacactttgaaaaacttctgctcttttctcagaagtgaattcatctattatcttatctggaataattcctttatacgcttttctccacgaacaagaatgtataaaacccatttctatagcattttcacttgtagctcgtataatctctaaattcataaaaacaccatcctattgacaaattaatacgattatcgtactatattagtgcgataattgtatcatatatggaggtaaaagtcaatgaatcctgtaaaagagctaaacaacctgtggcatattgttagtatgcagatgaaaacagaaatgtgtagtggtaagtatcctactattcatggtatttctttagtagaattaagtattttagaaatagttgaacagtatcccaatagtatgatgaaagaaattagtgaaattttagaattgccaaaaagcacattaacaagtgctgtaaaacgtcttgaattaaaaaaatttattaaaaagaatccctgtattaaagacaaaaggaggtataacttagtcttaactgaattaggtttaaaggctcaacaagaacatagagacatagaaataattgtatttagaaatctcttacatcaattagataaagatgaaatagaaacttttattcgtattttttctaaagctgtgaataaaagtaagaaatgaaatataaaaaaaggataagtgaattgaaaaatcaactatcacttatcccttataagataaatttttatcttttatgttatctttttaatctttaatgccatatttttaatcttcaataactatttttttaaattatagaaagattttaatccacagtatctagcttgttctccaaccatttcttctattcttaataattggttgtacttagcaactctatcagttcttgatggagcaccagtttttatttgaccagcatttactgcaacagctaaatctgctatagtagaatcttcagtttctcctgatctgtgagatataacagcagtatatcctgctctcttagccatttctatagcatctaaagtttcagttattgtacctatttgattaactttaactaatatagagttagctactccattttcaattcctttttctaatctctctgtgttagtaacaaataagtcgtcaccaactaattgtaatttatttcctaatctttcagttaataacttccatccgtcccaatcttcttcgtctaaaccatcttctatagttattattgggaagttgtttgaccaatcttcatataaagcaaccatttcagcagcagttaactcttttccttctcctgctaaaacgtattttttagtttctttgttgtacatttctgtagcagcaacgtcaagtcctaacataacatcttcacctggcttatatccagcttttgttatagcttcaactattaattctaaagcttctctgtttgaacctaagtttggagcaaatccaccttcgtcaccaacaccacaagctaatcctttttctcctaaaactttctttaatgaatggaatacttctgctcccattcttaaaccttctttaaagcaacaagctcctactggtaatatcatgaactcttgaacatcaacgttattatcagcatgctctccaccgtttaatatgttcatcattggaacaggtaattgtttagcatttactccacctaaatattggaataatggtaaacctatttcatcagcagctgctctagctactgccattgaaacacctaatatagcattagctcctaatttacctttgtttggagttccatctaattctatcatgattgcatctatagctggttggtcaaatgcatccattccttctatttcaggtgctattatttcatttacgttagcaacagctgtttctacaccttttcctaagtatcttcccttatctccatctcttaattcaacagcttcaaaagctcctgtagatgctcctgatggaactattgctcttcccattgctccatcttctaatactacttcaacttctacagttggatttcctcttgagtctaatacttctctagcatatactaattcaataactgacatttgtatatctcccttcgattttctattagttaaattttcatttactgtaaacatccgtctactattttaatctactttctatattatagtacataaagttgcttttgaaaattaggtacaaatttatttgatgggtaaatttgtaaaagttcctatttttattttattttttataatattttaatttatataatataaaaaaacttgtctaaaatccaaaaccaatcttaaatacacaaatattataactagatttaaaacattaaacataaaatgtacaactaatgattctaaaatttttgcttatataatatatattaattattattatttatattgttattgtctatcttgttattatttatatcattatttacattattatctatattataattttttattttataaattgtctatcttgtaaattttataaaatataccttcatctacaccttacaatatccagaacttacaaaatctaaatcttatgtcataaagtctaaactttacaaaataaacctaaactgcattatttttaaatttatattgtagtttatatattattctctacttatcagaatcgactattttgaaataagtgaatgaccagtcatttcttctggcttttctaacttcatcatatctaaaacagtcggtgctatatcagataatcttcctccatccaataattttgcactttcatattcttgaccaactacaataaatggtactggattaatagagtgagccgttacagtttttcctgtttccgggtctaacatatattcagcatttccgtggtcagcagttattattgcacttccacctaactctactattttatctatcaattttcctacacaagtatctacagtttcaacagcctttatagccgcttctatacttcctgtgtgacctaccatatcaggatttgcaaagtttaatactataaagtcaaacttatcttctcctaatttatctaaagctttatctgtcaattcatatgctgacatttctggttttaaatcataagttgcaacctttggagaaggtatcaatagtctttcttcacctttatttggctcttctactccaccattgaagaagaaagttacatgtgcatacttttcagtttcagcagctctaagttgagtttttccatttttagctagatactcacctaaagtgttggctaaagattgaggtccaaatgctatatgcacattctctatagttatatcgtactctgttaagcatacaaagaagtttttaatatcttctcttttaaatccatcaaactcttcacaaactaaagctctagttatttgtctagctctatctggtctaaagttgaagaatataattgaatcattttcctttatacttccaactggtttatcatctttcataataactgttggcattataaactcatcattttttccatcatcataagagttttgaatagcttcctcaatagaatttgctttttcaccaatacctctaaccatggcattgtatgcaagttctactctttcccatctcttatctctatccatagcgtagtatctaccagaaactgtagcaaattcacctactccaatttcatccatactagcttgtacttctttggcatattctaatgcactttgagggtcagtatctctaccatcagtaaatgcgtgaacatacaccttttgtacgcctttatcttttgccattttgattatagccttaagatggtctatatgtgaatgtactcctccatcagacaaaagtcccattacatgaagagaattttcttttgcattatccattgcttcacataaaactttattagcaaaaaagtcaccatcttttatagattttgttattctagttaaatcttgatatactattctacctgcacctatgttagtgtgtccaacttctgaatttcccatttgaccatcaggtagaccaacatcaagaccactagcatttatcaatgtgtttggatactctttttttattctatctaaattaggagttttggactcagcaattgcatttcccttaacatccttattgtatccaaacccgtccataataattaaagcaactggttttttcatcatttcactccttagaaattaacaaggtctaggtaatcattactagctaaactagctccacctactaaagctccatctatatcactttgacccattatttcggctacatttgaaggtttaacacttccaccgtattgtattctaacttcattagctaattctccatataatccttttataacttctcttatataagatataacgtcattagcatcttcagcagttgcagttttaccagttccaatagcccagattggctcatatgcaacaactacttttgataaatcatctttaagaacattttctaaagctttttcaacttgaactttacaaacatctttagtttttccagcttctctttgttctaaagtttctccaacacataatattgggtctattcctacttctaatgcttttaaaactttcttgtttacagtttcatcagtttcattgaagtattgtcttctttctgaatgtcctattacaacatagtccatatctatttcttttaacataagaggtgaaacttctcctgtaaatgctcctttttcttcaaagtgcatattttgagcacctatctttatatttgtacccttagtagcttcttttaaatcctttaataaagtaaatggtgcacatataacagcttctactttatcagaatttactttatctttaacttcatttacaaattctaaagcttcttttattgttttatgcattttccagtttcctgcaattataggttttctcattttacaatctcctctatatattagtttatttattatctaatgctgcaatacctggtaattctttaccttctaaaaattctagtgatgctcctccacctgttgatacgtgagtcatcttgtcaccaaatcctaattgattaactgctgctgcactatctccaccgccaattacagtagttgcatcagtcaactctgccatagctctagctactgataatgtaccatttgcaaagttttcaaattcaaatactcccattggcccattccatactacagtttttgattcttttatagtttttacaaagtttgctatagtcttaggtcccatatctagtcccatgtaatcttcttttacattagcatcttctgttactattggagtagcatctggtgcaaagtggtctgccataacaacgtctactggtaataataagttaacacccttattattagctttttccatcatttctttagcatattcaactttatctatttcaagtaaagaagttcctacttcataaccctgagcttttaagaatgtataagccattcctccacctattattagattatcaactttttctaataattcgtttataacagctaatttatcagaaactttagctcctccaagtatagctgtaaatggtcttacagggtttgcaacagcttctcctaagaattttaattctttttgaattaagtatccacaaactctctcttgtaaaaactcgcctgcaccaactgttgagcaatgtgctctatgagcagttccaaatgcatcatttacaaatatttcagcaagtgatgctagttctttagagaaattctcttcgtttttagtttcttcttttctatatctagtattttctaataatactacatctccgttttccattttttcagttgctttctttgcattttctcctacaacattatcgtctgctgcaaatacaacttcttttcctaacatctcagataatctctttgctactggtgctaaagataattctggtttagcttctccttttggctttcctaagtgagagcataatataacttttgcccctttagaaattaaatattgaatagttggtaaagctccgttcaatctattttcatcagtaattacaccatcttgtaatggcacattaaagtcacatcttactaatactttttttccgcacacatcaatatcttctatagtttttttgttaagcattgacataaatatctctccttttaataaagtaattttttattgccaagtataatatagtacatacttttaccctattaaatatatcatattatcatatttttatatatagtatgtaacattatttaggtgtattttatatattttttcttaaaaaaagtcctgagtccgtagtattaaactacaaactcggactttgtcaatctacttttctattttctcaaaactgactattttgctaattgtgcaaagtatcctaaagttcttattaattgagaagtataagacatttcattatcataccaagaaacaactttaactaattgttttccatctacttccataacttttgtttgagtagcgtcaaataatgaaccgtagcttattccgattatgtcagaagatactaacatttcttcagtatatccgaaagattcgtttgaagcttctttcatagctgcatttatttcttcaactgtaacattttttcctaatgtacaaactaattcagttattgaaccagttacaactggtactctttgtgctgccccatctaattttccttttaatgaaggtattactaagcctattgcttttgcagctcctgtagtgtttggaactatgtttccagcagcagctctagctcttcttaaatcaccttttggatgaggaccatctaaagtattttggtcattagtgtatgcatgtatagtagtcattaatcctttttctataccgtatttatcatttaatactttagccattggagctaaacagttagtagtacaagaagctcctgatataactgtttcagaaccatctaatatgtcactgtttgtgttgaatactattgtttttaaatctccagtagctggtgcagatataacaactttcttagcccctgcttgtatatgagcttcagctttatctttagatgtaaagaatcctgtacattctaatactatatctactcctaattcagcccatggtaggtcagcaggatttctttctgctgttacttttatttcttttccgtttactacaaaagcaccttctttaacttctatttctccgttaaatcttccttgagctgtatcatatttaaataaatgagctaacattttagcgtctgttaagtcgtttattgcaacaacttcgaacttatcttgttgctccatcatttttcttaatgctaatcttcctattcttccaaatccatttatagctactttaaccattttcgctacctcctataaagtaaatgtatgttttctagctctgtgctaggtcttgacttttataataatgacaatatcttataagcactttcttcatctgttacaagaaccatgtttttatgcatatttgatatagctaataaggcttctactttttcagtccctgcaaagattgcaatagtttcttttacttgtttaactgtttctaaatcaattccaacagtgttcagtttgtaaactatttctccatctttgttgaaataatatccaaatgcttctccaactgcatttttagataatatctcatcaaccttgtcttctggaagttttcttctctttgccatgacatctgctctacctatactaaaaactaaaatgtctgttcttttaatatactccaaagttgtcttaatctctggcacttggctaagagttttcattgcactttcatccaactcatctggtatatgtaaaagtttgcaattagaatgtaatttcttacttattgaagcaactatattgttagattgcatctctacatcagttcccatacttcctctagctggaactattgtagagtttggatatctcttatcagttttaataacgtttgaaaactccaacatagtgcttcctcctgttattgaaacgatatctccatcttttaaaatgcctaagaaatactcgcatccatatctagttacatcttttagtaaacttccattttcatcacagcttccaggaactagtattaccctttttattccaagcttttctctgactctatcttgtaacttagacaatcccatgatgtcactcatgatgtccttaagtttatctaacaaatcagaaccttctttagtgatagtcatcccagatacagctacgtctataagtccttgttcttttaaaaactcagtttctgacctgattattctttcactaatctctaatacatttgataatgttctcctacctattggttcacttaaagatatttgtcttaaaatagagtatcttctttccataagttcaattgcctgtggaatcaatttcttttgaatttctaataagttcttcataacatactccttattgctttcctttcgggactttttttgtccctagtgtttatttaagtcccacaagatatttttattttataggatttgcgtatagatttcaatagtttttcaaaaacttttttatttttttattttataaaatatttctccaccattttcaaatcacagtattttttctttttatataaggctttttatatatatttttttatattttcattctaatatttattactataaataattttatttctagttacttttatttctagttatttttatctacaactaagtttacttttatctagttaagatttttatttataccctacgtgttttccttttgtgattattaaatttaataatagtttatttatctaggtattcttctttttctaatatctaattattctttacaaacacttatttaatttaatcattctttataagcacttatttaattatgttttctagttttttagcattttacaatattttaatgttccccagtttttcaattctttttagtatttttatattttataaattttaatattctttaaagttctaatattcctcaaagcctaatgttctttaatgttttaatcttctttagttttttatgttctttgctatcttaatgttttaatgttccccagttttttaataccttatagcattttaatacttttccatattctattattttactttataaaatttttagcccaatctacattcatctcttaattagccttttccccttaccatactgatatttgtcttttacttattagtattcttttctcttacttgaagatgggattcctaattcttcacgatatttggcaactgtccttcttgcaacattgattcctttttcttttaataacttagatatatggtcatcacttaaaggtttctttttattttcgtcttttattgtttcctttataattttttttatgcttgtactagatgccatttcattattctcagtctcaatggcgctactgaaaaagtacctaaattcatatacgccaaaaggtgttagcatatatttaccatttacacctctacttatagtagattcatgaaattctaatttttctgctatgtctttcattttcaaaggttttatatattttgtcccttttctcaaaaattcatcttgagcttttactatctcttctgcaatcttaagtactgtagttttcctactctctatatttttcataagtcctgttgctgaatttagtctttcttttataaattcttttgcactttcatcagactgtgaattttttaatatgtctttataataactattgattcttatttggtaagaatctttctcatttaaatatacaataaattcatcatcaatcttttctactgttacatcaggttgaatgtatacacttttctctactgaacaagttcttcctggtttggggtctaatgtcttaattatgtttattagttcaacacatttttgtaatgacatattgtactttttacttatctctttatatttattatttgcaattaaatttaagtcttttgtaacgatttcctctaaaatttcattatatattcctaaactagccatttgtatcatcagacattctgaaagacttcttgcccctactccactaggttccaactgctgaacactaattaaacatttttcaaaaagttcttcatctatctttaaggtatcaacaattactttttcctcagttcttaaatatccatcctcatctaaactatcaattatatactcacagacttccaattctttgtctgtaagtttatacaggcttatctgaaattttaaatcttcatataaatttgacgaatatttaactaaattttctagattaacttcattatcaggattatagcttatctctgttctatctaaacgtcttgacctatccatgtcttttatatactcttcccaatttatctccccacttttctcgacttcaactaatgggttattctctgcttctctttttatctcttcttctaactctaacttactcatatttaatattgataatgattgcttaagttgtgtagtcattattagcttctgagactgagttaattctagactattattaaaattcattctgctcacctctcaattttattaaacttattttataaaagaaaaaccctcctgtatatgtatattctatcatttaaaatataccttatgcaaaagggttttttttatttacaatttcatctatttttttatttaatatttcttttttttgttacttttttttactatatggagtattttgtagtggtagctcagttctaaattctttatcaaatacataataggcattttgtactgctggtgcagtaggaactgtacaaatttctcctacaccttttgccccataagccaataaatctttgttcttttcaactattaaagcttgtatttctggtatatctgtagatttaaataaacctaatgtaccaaacttagctgtaggaacagagttaactactgggtaatcttcggttagagcatatccaagacccataactactccaccttctatttgaccttctaaactgattggatttatagctcttccaacatcatgtgctgctactactttttctagttttccattttcatccagaattacaacttgtgttgcatatccataagcaacatgacttactggattttctttgtcacaacccattttatctgtaatactttcatattctccataaaactcttctccctctaaatcaagtaaagttttgccagagtctaaagcttcttttaacttatttgatgcaaccttagtagcttctcccgtaaatactgtctgtcttgaagccgtagtattaccagagtctggtgttaaatgagtatctggaacttcatgcactatattttcaggaagtaggctagcagtttcacaaactacttgagtcataacagtaccaagcccttgacctatacaagaagcacttgttcttatgtgaactttgccatcttttatcaccaatctacatcttccaacatcaggtataccaactccaaccccactatttttcatagcacaagctatacctgcacgtggatgcttttcatactcttcttttacagcttctagtgtctctgccattgctgttccttcatctgcaaattgaccatttggtaaaacttgcccaggtcttattgcatttttatatcttatctcccaaggagatattccaaccatttcagcaagtaaatttagattacattcagttgcaaaacaactctgtgtaactccaaatcctctaaatgctcctccaggagggttattagtatatactgctgttcctgttatatcaatatcttgataattgtatggtcctgctgcatgagtacacagtctttgtagcactggtcctccaagagaggcatatgcacctgtgtcagatattatcgttgccttcatacccgttaagtatccattttcatcacatgctgtcgtaaattccatttctgtggcatgtcgttttggatgaacaataatactttcttttcttgttaactgtacttttacaaatctctttgtatggtatgcaagtaaggctgcatggtgttgaacactcatgtcttcttttccaccaaaccctcctcctaccattttgtttataactcttaccttctcatatggtaaccctaacatatctgcacattcatgttgagtggcaaacaccccttggtctgttgaatagattattactccatcatcttcataaggaccagctactgcacattcaggctctaaaaatgcgtgttctgtagcaggtgtagtatatcttttagttacaacatattttgaattttctatcttttctttagcgtttcctcttactaaatgttccttaacaagtatattccctgtctcatgtatctttggagcatcttctctaagtgcatctgctgtagtacttaatggtgttaattcctcataatctatcttaactagctttttggcctcttctaacgcttctctagtttctgctgctactaaaactattccatctcctaaatatctagttatttcaccttctggtattaaagtatcccaatccttctttaagtgccctacctttatagttcctggaatatctttagctgttagaactgcaacaactcctggataagcttttgcttcttctatatctatttttttaactaaagctctaggatacttagctctaactgctgaaccataaatcataccctcaattctcatatcatctacatattcagaatatccaagtgctttgccaactgcatcaactctaggaagattttcacctactagacccttacagtttacttttggcacatctatattttctctaaaaatctttgctgctaaatcgacagctttaattatttttacataccctgtacatctacatatattaccttttaaagctttctttatatcatcttcagtaggattattattaacatctataagtgcttttgaactaattaccatacctggaatacaaaatccacattgtacagctccttgactagcaaaagaatatgcaaaaacatctctttctctctctgataatccctctatagttgttatgtttttcccagctaatttatcagttttaaatacacatgctttagtagctttaccatctattataaccatacatgttccacaagcaccttctgaacagccatttttaactgaagttatattcatatcttctctaaggaagtctaaaagttttttgccttcttttgcaacaactttctctccatttaatataaattctaccattctctagccccctttgttagacgcctatttatatatctcccacttggagtattacaaattaattctccatctctaactacttcttttcctcttaaataaacatgttctatttgacaatccacttcatacccttcataaggtgtataatctacattttgtaattgtttttttgcttctattttggattttttgtttggatttaagactaatatatctgcatcactgcctatttctatagttcctttattaggatacattccaaacaactttgctgcattagttgatgttacttctaccatcttgttgatagatattttatttttacagactccatatgtgtataaaagactcatcctatgttctacacctggagaaccatttggtatcttactgaaatcgtttatcccaagttccttctgtcccttataattaaaagaacaatggtctgttcctatagtgtctatttgattatctaaaatagcattccataatatttcattattttctttatttcttaaaggtggtgacattacatacttagcactttcaaatccatctaaatcatataattcatcatttaatagaaggtattgaggacaagtttcaactattacatccacacctctttgcttagcttttaaaacctcctctaaggattctttacagcttaagtgaactacatatacttttgagtttgcaacttcagctatcttcataagtcttgatgtagcttctgcctccattatagctggtctagttaattgatgatattttggagataaattattttctgactttgctttatccacaagttcacatattatgtccccattttcacaatggaaaccaataatccctcctatctcttctgcttttctcaatgcttcaaagattacaccatcatcaacttgaaggcttcctttatacgccatatacagtttaaatgaagatactccctctttcaccatatcctccatttcattacaaaccgagtcattccaatctgttatagccatatgaaagccataatctgaataggatttatccttagctttttcatgccattcttctaatccgtctttcaaagaacatcctttagcttgtgtagcaaaatccaatatagtagtagttcctcctactatagcagcttttgttcctgtctcaaagttatctgctgtcttagtaacgcctgtatctaagtcaaagtgtgtgtgtgtatctatacctcctggtataacataagaatcactaacatcaactatttcatcattttcttttgatatatcaagacctatatcgactattttttcatcttctattcttacatctgcacagtaagttttttcacttgttactactttcccaccttttaaaacaattcccatatagactccaccttacttgtaatgtatcaatttattttatatgaaaaaattaacttaaagtaatctagttagttcacttatacgtagtaaatctatattaagattaaaccaatacctaattaaattaatattcagctaaactaatatttagttaaatcaatataataaaattattaactttagactgtattattaatgcataatgtgtgtttgtttatctgatatattttattatcctaatacctattactctaagttaattaccaaaattctatataattattactcattcatagcttctacttgattgtagcagatgcttaaagctccttttggacatctagttacacataatccacatccaaaacacttgtctgcatctatgttcaacttatctgtaacttctaaagcttcgtatacacagcttgttacacattgcttacatttgatgcacttgttatcatccactactggagctactgaatgagttctaaaccctctagctgccattttcttatgagttaatccttttatttcattaacatcagcatatccattctcatctaaaaattcatttaattctttagcaatttttccatagatagaaggccctttaaggattgcttctgtacatacttgaacagcacttgctccagccatcatcatttcagccacgtcttttccacaagtgattccaccaacaccgattattggtatatttacaacttgagaagcttcatatatacatcttattgctagaggtcttattggtgcacctgataaccatccgtatccagctttacttcccattatagggtatcctgtatttacatctattgccatacatggtccaaatgagtttatcattacaagtccatctgcacctgcttcttcaacagcttttgcaatagtttgaatgtcagtatgaggactcattttcataaatactggtacatctaaaacagcttttgcagcttttaaagcatttactattggtgcaacgtctgtacctacataatgagtagataattcaactgcatctgcataaggctttactaaaggagcaacctcagctatttgctctgctgaatatcccatacttactattactggaagccctgtttcttttacctttttgtattcttcctctatccattgctcttttggaagctctgaccataattctgtgtttaaaaaaccactattagtttttgccatacatggtcttggtacatcagctggtaatacagatatagtttttgtacatatagctcctgctccaccttttgctgcctcttgacagagagcaccatcttttgctccaggtcctgccgctgtcataattgggtttaaaaattccattccatataaattaacttttaaattagccatattattatctctcccttaaattaaatatttttaatatttagattgtattcttttatttgtattcgttatttatttacttttttatattatttaaaatataagatagttttgttgaattattaatatctctgaattatttttattaatgcttaatgactttaagtcaatatagatttttacttgttttatttttattttgcttcttcaactttattatttttttcttttttagaacctagttcattgaagaatatgtttaaaagcactgctgataaactacctgttgttattccactatggaatattgtttgtacccaagttgggaaattatgatagaaatcgggatttgttagtggtatcatagacaaaccaacactaactgctactataaccccatttttagttccatcaaatttcactttgcttaaagtttttactcctccaaccattaccattccaaacattgcaaatcctacgcctccgagaacaggcttaggtattgctcctattattgctgcaaattttggtaagaatccaagtactagcaatataacccctgcgtaaactgctataaatcttgattttatacctgtaagacctactattcctgtattttgaccaaatggagttattggaaatgaattgaatattccagataatgctgtagatattccatctccaaatagacctcttttaatatttttacctgttacttctttgtctaccatttcatgaatagctatcatattaccaactgattccgtcataagtaccaacataatcaaacacaatgatagtattgcagatggttcaaatctaggcattccaaattttaaaggtacatttaagttaagccaaccaactccatttactgcactaaaatctgccattccaactgccatggaaagtagtgtaccaagtactatacctaccaatatagctgtgctattccaaattccttttaagaatttaaatgaaagtaaagttattgccaatactgctaaagctaatgctaatgagtttggttcaaccgcttccaatttgttgtcagttatccattttatcccaactggaaatagtgaaatacctattaccataacaactgttccagtaactacactagggaaaaatcttattaatttttcaaatactggagcaagtaatatacaaaacaatccagctactattacagagccaaatactgtctgtattgcaacttgtgaatcactatatgatgaggctattgctgtcatacctgccacagcggcaaaactagttccttctattactggtattttagcacctacaatatttcctataccaacactttgtatgagtgttcctatacctgccataaacaagcaagcatttattaaaaaaacaatactagcatgatctagtcgtgcagcacttcctatcatcataggaactgctactgctcctgcacacattgctaaaacgtgctgtagtgaaaatacccaagatttggatacaggtaacctttcatctactggagctattttagggcttttatcttgagacattttgggtctcccttctatatttaatttaatattctattccgtatattttttatttatatacttcatttaaattcctatttttgtttaagctctgtttttaacatctaaattcttgtttcttacttgtatattaatctgaacctcccatgactaaagtcacagggttcctgcttcatagaattttgcataatcaattatttaaattctattccatagattttgacttaattctctactttttgctagaatactttcttcatctatgtttattaactttctatctttcataagtacttttccatttataatagttgtatctacgcttcttccactcattccaaaaatagtgtgtccccctattgtattttctgtcaatggagtatgtggtatataatcaactactataacatctgcataagcaccttttttaagtactcctaggtcatttttataataagctttagctatttttctattgttatcaaataacattgtttgtgattcttcaaatccaactcttgggtcttttaagtgatgtttgtgaattatattggcaacttttaatgattcaaacatatcgctagtatatccatcagttcctaatcctactgtaactcccctttttaataactctattgcaggagaacatccaactgcatttcccatattagattctggattatgaactacaaatgtatttgttttatttaaaagactgatttcttctgcacttatatatatacaatgaactgctattgttttttcttttagtactccaaaatcattgaatctttctaaaaccctttttccatatttatctacattatattgtaagtctgctagtccttcagcaacatgtacatggtaacctgtatcaagaccagccatctctgaagcacatttatttaatgtatcatcagatagtgtaaatgcagcatgaagcccaaacattccttttatcatgtctgtatcatctttttgagcgtattttataaagtttacgttttcattgataccttgttggattgtatttccaccatctctatcagacacttcataacaaagacacgttctaattcccaaatcctttgcaacatctgatattgtaaacaaactgccttcaattgcatttggacttgcatgatggtcataaactgttgttacaccattttttatgcattctatatacgttgcatatgcactgtattttgtatcttccagtgtaagctgtttgtcaagtctccaccataaattatttagtatctctaaaaagttctcagaaggttttcctggaactgccattcctctagcaaatgagctgtatatatgcatatgtgaatttattagacccggcatgattattttcttgcctgcatctataaattcatgtactggatatttagctttcatttcttctgtagtacctatatcttcaattagattatcatttattactacacatccatcttccatatagggatttaaagaatcttggcttattagcctcccattccccactaaaatcataaatttattcctccttaaagctaagatttaatttttaagtacttttcctgctttaattttattgtattttccttcttcaacaacacaatttccatttataattacgtaatctatacctgtagggtactgcatagagttgataaaatcatcacaaccactaactgtatccttgtcaaatataactatatctgcaaaatatccttcttttaattcgcctctatcttttatactaaagcttgtagctgcctttttagtcattttataaacagcttcttcaattgttagtacattcaactctctaacatatcttcctagtattttagggaaagaaccataagctcttggatgtggtttacctgctaaaagaccatctgtacacacattttgctcgtctcttttcatgaatcctattatatgttcttctaatccatagaaatctaccatcccaactgcattttcttcttcttttaataaatcaaacgttgcatctaatgggtcttttcctctcatttttccaatttctaataagctcttaccaattgtatctttattcttttctgtttttacgcttgttacaaatatttggtctattccagcaaattctataaaattatcccagccttctattccatttgctatatcttttttcatttttgctctttcgttttcatcgcttaatctttctattaacttatcagttcctccagaatgtgcccaaggaggtaaaactactccaagcattgtacttcctgctgcatatggatattggtcaaaagatactcttattccttccttttctgctttttctaaaagctctataacttgtggtatatacttccagtttgctttaccacaaaccttaaaatgtgaaaaatgaacttttactcctgattgttttccaatttctatgatttcttccattgaagttaaaattgtatctgcttcacttctttggtgaactacaaatactccgtcatattttgctactaccttacacatctctataatttcttcagtcaatgagtatgcacaaggtatatatataagtccagtagacaatcctatagctcctgcttttaattctctctctgtgatttcacacattttttgaatttcttctttagtagcaggtctatcttcaagtcccatagcttccattctaacgtttccatgaggtactaaataagtttcatttaaacctaccccattgtaatccatcatttttaaataattctctgttgtttcatatttccaatcaatttcatcactttcaccatctagacctgctaaattttttctccaagaagatatatgctcttgaggtagaggggccatagatataccatcttggcccaacacttctgttgtaattccctgtctaatctttacctcattatatggattaactaaaataactaggtctgaatggctatgagtatctatgaaacctggacatataactctaccttttgcatctataactttgtcagcttcttcgtttaaatcttgtgatatttttaatattttctcgttttctattaaaatatctccttcatatgctggtgttttatttccatctactataagcccatgttttattaaagttctcacaaaaccatctcctaattattttttataaactgattttaatataccataatatccttctgcacctttgaataattggtctaattctatatactcatctattgtatgagcaagattttccttagaaggaccaaatcctatagttcttattccagcctcacctgcgtagtgacttccattcgtacagaatgagtattgagttatttctgaatctattccagcttcttttaatccattatacgctgcttgaacaaattcatcttcttcatcatataaccaacctgggaagaatctttcactttctatagtatttcctgtatagcaatcagctttttcaactgcataagaaacttttgcatttaattctgggtcttctttcatcatttcatctaataaagcttgtattggagctaatacgccttctcttgtttctccaactaataatcttctatcaaaagtagctttgcaataatctggcactactgatgctcctggatatggagaagattttatatctgttaaaactaatattccatcacctaaaactggatgagttggaggtactaattgttgtatcttttggattacattagccattttataaactgcatttatacctttttctggattagcagagtgagctggtttaccaaaagtttctactactatttctcctctacctctttgacctatctttaagtttaattctgaagattcacctattacaacataatcaggttgaacagccttacttatctctctagctgaaacaccttcaaatatttcttcatgaacaacacctgctacatacaattcaccttcaaagtctttgttagtatcttctgcaaagtatgaaacagcagccatcatagcacttacttgccccttcatatcagaagttcctctaccatatattttcccatctactattctcgcttcaaaaggaggaacactccatttacttgcatctggaactggaactgtatctatatgcccgtcaaataatatttttttacctggtttatttccttttatacatcctactatatttccatatctatctcttgaccaactatcaaaacctagtaaagcaaaattttcttctatagcttttactacgttttcttcttgacctgaataactagcatttcttattaagtcttggcatacttcagttaattgtttttttcttgtttcatttaacattttgatattcccccatataatttttaatttgttgacgttttattttgatatttcacttttttaatttattagcatttcacttaatctattgattttttatttctttatattttatttattaaatttttatttagactttattttaattttatttggttttatttaattttatttagtttttattttgaatttttcatttgctttactttttcatttatttagatttttcatttgttttagtttttattttatttaaagttttcacttatttaagtttttattttccttaaatttttcatttatttgttaagtttttattttccttaagtcttttatttactttggcattcaccattccaaactatatctctatatttatcagggtcagtatctccttctgtacttattaataatactttagagttctcatctagtttcaaagcttctcttaagtcttttaaatcttcactttcaaggattgaaactaatgctccagttgtaactgctccagattctccagagattactttctcatctcctcttagagggtttcctaatattctcatacctttagcagatacccagtctggtgctgaaacgaatgctgatgaataattttttaacacttcaaaacctatagtgtttggttctccacaagcaagccctgccattatagttggcatatctcctccaacaaatcttggttttccatctccagcttctgctgatttatagtaacaatcagcctcatcagcctctactactactgttattgggcattcatcatatattgaagcaacatacccttgaactgcaccagcaagtgaaccaactcctgcttgaacaaatacgtgtgttggtctatctactccatattcttttaattgttctatagcttctttagccatagttccatatccttgcattatccatgctggtatttcttcatatccgtcccatgctgtatcttgaaccattactccatggtcatcagcttctgcataatcattagctaatcttactgcatcatcatagtttaagtctgttatactagcatctgcaccttctcctttgattttatttaatctaaattcagaagaaccttttggcattaatacaacagatttttgacctaatttattagctgtccaagcaactcctctaccatgatttccatctgtggctgtaaagaaagttatttctcctaatttttcttttatttcttttgaagttaatttgtcataccctaactcagatatatctgtatctaatctttgagctaagtatctacccatagagtaagaaccacctaaaactttaaatgcgtttaaaccaaatctataagattcgtctttaacatatattccgcttacgcctagtgattttgctaagttatctaatttaactaaaggagttttttcatattgtggaaagctctcatgaaaagctttagcctttgcaatttcttcatctcttaaaaactcaattcctttttctttttcctctgatttaggtaagttatttaatttccattttatttctctcatttattttatattcccctttcaaatttttcggtgtcattttaattttttatctttgtgtcttatagtgaagcaattactatgccaatattatttattctaaaaacaatttttttatgttggaattacatatatttataaaatttctttgaattttataaatattaaatgtgaaaaataagatttataaaagaaaaaattctcatattgggaaatttttatcaatacgagaattatcaattcgagaaatcgtttatttattttaattcttcctttattatgctcttattttttatatgtctattgttttgtcagatatattactacttttattttctataaatatatggctataaccttcttacgcataaactctataaatttatatactttatattctttattacccaaatattctttattacccaaagcctccaaaatggcttaaatcttttcatagcttcttacagaagtttacatgggcgtccctccaataagcaaaagtgcaatatgtgtaccattgtgtcctacttgcgactattgagctgtcgaaattcgcaacttcgcatttatctgatgaaatgcactatgcaaaatattcataacatccacaacagagttaaagttacctattcatattcactgtaaaaatttcttccacaggaaatgtaattttaaccaatcctattgagacaaactcaccacttatttttttgaactcacgcagtaatacatcacttgcccgaaaaaaagcctcactttcatcatctccagtaagtgctattgtgcaatggggtacccaacgattggggtggtaccattcccaaccatttgaatcaaaatcttgtagtacctcatataattctctctgaaactgatacatactgctattcattataggtgatacaaacaccgttttagtatcattaaacatgcctactgaaccaatgtaagcaggtattaccttatggttttgtgcaaacccctttagcttgtctatgcaacaagcctcatccacatcattgaaacaagccaaagtaagatgaggtcttgttttccattctaagtacttcgtactaattttttcatcagcgatttttttagataaatcaaaaagttgcttttccgtttttttatcataatatagctctatcgcatattgcataataacacctccaccataaagtaaaaatacctatctataaaaacacacaaatacctatcattttaatattatattactactgttcctcttccaattttctatatagtgtagccaaacctatacctaaatcctttgctatcttcttcttcgtctttgtatctcttccatacttattcaacaacttgtttatgtaagtcaactctaattctttaattgaaagtatcctttcctgattctctactatccctccaactatgtcatcttcaaatattatatttatatccttatttttacaaacatttccattaatattataataatttaaaatatccaatggaagcatatctttatatattattccatcatctccaaccaaattcatcatatattcaactgcattttccagttcccttatatttcccggccaattatagttaatcaacatattcattacattttcttctattttatttaactgaatacctaattctaaagaatatttagaagcaaacttcatcattattgcctcaatatcatcctttctttccctaagaggtggcaaatttataggaattacatttaatctatagtataaatcatccctaaacttaccttcatttactaatttcaataagtttttatttgtagcagcaatcactcttatatctaaatctataagtttatttgacccaattctcgcaaattttctctcttgtaaaactctaagtaactttgcttgtaaaggcattgacaaatctcctatttcatcaagaaatataacaccttcatttgcaagttcaaatttacctactttacctccactactagctccactaaatgcaccttttatatagccaaatagctcactttcaaggagattttctggaatagcagcacagtttatcgcaataaatggcttgttccatctgctaccttcagcatgtatagccctagcaattagctctttacccgtaccactttccccagttataagtacagttgaatttgactttgctaatttcttagttctctcttttacttttaacattgcctctgaatttccaattatagactctatatcactatttccccagccactattgacttttccatgtcctttatgattgatatatgtcttgtcaaatattattattttgtcgtattgatttatatatggatataccggaattattttggcatttatattataaattttgttatcaatatcaatttctagtaattcatgtccatttgaggaagattcaacagatactatatttactatattttctattatatttttatatatatctaatttttttagagctatattgtttatataagatattttgctatttatgtctagtattataacgcctttttcaacattttcaatgatttctatcatcatatccatttttctactgctattttttgacgcttcatgttcttctattttcatagaaattaaatcgcatatatgattgacaaattttaaataattatctatttttgcacttatttctacttttttagttttatctgtactaatagcaccaattactcctatagttcgattattatactttattggaactgctattattactttatttaggcatttcatgtaatgggaacattctatacaaagctgattatcacatatatccaatacgactaattcctgacctgtctgtataacattgtcgtaaataaatccttctgtaacaacgctttcatttatctttgatttatacagacctgtaccactaattcttattaatctatcatcaactatttcaatatctacatctaacacactagctactgtttcagtgtattttatcatttcttgttgaaattcttttaatttacttaacatagtttcccccattagaatttaatttaccaaattatcagtttagctatattttaacatatagtcactctttaaaatatatataaaacattacttatttatatatttacattaaaacacacaatattaatttataaaaagtttgttttatatgatgaccttaattacttaattataagatacagacaataaagtaaatcacaatacaataataaaataaaaaaagctttcctcatataacaaatatatttttgacataaaaatatacattatatgagaaaagctcaatagttaaatatttagatagatttttatatagacttttttaatataaacttttttaattgtagactttttttattagtttttaatttttattagttttgttattggttttattgttataatacttataatactgccattgcttcaatttctaaaactgcatcttttggtaattgagcaacttgtacgcatgaccttgctggtggattttctttaaaatatgtagcatatacttcattaatatcattaaaatcctttaaatcttttacgaatactgtagtcttaaatattttatccatacttgtaccagcttgttctaatattgcttttacattatctaaagaagcttttgttgcttcttttgggtcagatactaactcgccagtcttcatatctattggaagttgacctgatgtagaaactatgtttccaacttgaattgcttgagaatatggtccaattgctcctggagctttctctgtagctattactacttttgacatgacttcacctcctattattaagttatatttacaggaaaataaaatttcctaaacaccaatattaatacgaacctttagattaaatttcaaatctaaaacttcaaataatcaatacttagatgattatgtttatttgtgtcttgttaacttttattaaagcaattaacgtgccaaactttatttatatataaaattttgtgaagtcattcaaaatagttacttctgaattttttcgtaaaaaaatgctttaaaattacttttttatgatgtcaatttttttctcatatctagaaatttaccaacatgagaattcttgttttgagaatttacagattaaagttatttttcaatcttaaattatcaagttattacatatgaaagaactatagttgacaatcccactattataaataataaaacctttacccataccttatttaccctagttatcatagagcctattgaaaatataacagctaaatataataataaccaaaaaattatcaatatctaccactgttgctgaaaatccaaaaaactaccttttgatagtattacttaacaatctaattaatctcataataaatttacaacttataaataaattgttatattggccgtatctcaacaactttctcctttcctagttttaaatcttttatagaattgtaccacgtctaagtaaattttcatactattaagtcttatttctaataaatcattagctctcattctatgcccaataatgtaagattgtagtaattttattgattttaatagttttatttaatatacttatattaattattttcatgtgaaattattacttatatagggggatttttttaatatgagcaaaagtgaattaacggcagaaacaacagaagaaatgttagaagtactaagtggtaaagattatgatattgcatgtcatttacatgaacttggtaaatcattagattgtaaaattgaaccaaaaacaggtgctcgttcttacaaaatagtatattcaactaagaaaccaaaacgtagcttatttactattgaatgtaatgaaaaaaaatggagagttaaagcaaatctttttcatctaaatacatataaagatgctgtggaggaatgctctaaaactattaaagatagtataactaaaactcgtacttgtaagaaatgtaattcaaagtgtattggaggttcttcgtttgatttagatggaaagtcttatctgacttgcataggaagtggtcattattttgcaaatatggaagaaatggattggaaaaacctagaaaaattaattactaaagaaaataatattatgcaggaatctgtatagttttttaagggtaattattaaaatatatgagtaacaacagatacttaaataggcataaaaaaataaagggtataataaggatatagaataaaaataaatgatatagcacaaagaggctgtctcaaaatatagataagcctctttttattgttgaaatgataagaatatattcgattttatacaattttatacaaacatactaagccaacttacccatttcatatgcctgtttcattgccttacttcccttaatatcacctacattccaagcacctacaccatatactatacctttttctttagaaccatttagacatgatgtaaatcctctaaatccttctattgttctttccatatcagccacattttcatctgctgctgcaacgataaaatagaaatctttatcacaaatttcagtatatctagagcaagttctatcaatcatagttttcatttgcgcattcatagtataaaaataaacgggagtcgctaaaacaatcacatctgccccaatcattttttcaagaatttctcccatgtcatctgtctgtgaacaacttgcttctttttcataacaagcaccacatccagtacaatagttaatatctttatcttttaaaaatatcttctccacttgatttttagattctaataccccttgtataaactggtcacacaataagtcagaatttccaccttttctaggactagctgatactattaatacatttttactcataagatactgcctccattttcttatttctactgctctttaatactttttctttctcaataataccttcttcatatctatcaatcttaaaatttaatcgttccaaagttttttgcatttcttctattctttttgctagttggtttctctgctctattaaaagttcttttctagctttgatagtactgctcccttgttgaaacatagctacatactcaattaatgtctcaatagaaagacctgcacctctcatacactttatgaaattaacccactcacaatcttcttctgtaaaagacctaattccacttttatttctatttacaggtggtattaaaccaattcgttcataatatcgtaaagtatccgctgaaagctcgtattttttactaacttctgaaatcgtcatacatatcttctcctcttgatattgtatagattgaattatttctcaaaggtttctgctacattctttaaagcatctataattttaatgtgttgaggacagctttcttcacattgtttacattcaatacaatctgaggcctttccataagttttagtataattattatagtaaaccatctgtgttgaaaatccagtattaagagcttgtttttctgcattgtacagcgcaaaatagtttggaatagcgatattttttggacagccttctacacaatactgacaggcagtacaaggaactaaaattgattcgttgataatctctactgcttcatctataatattatattcctcttgtacgaatggtttgaaattttgcatatatcctgtattgtctaataattgttccatatttgacatcccacttaagaccatcataacattatctttacttgctgcaaaacgtattgcccaagatgaaattgacatatctggattgtagtcattcaataatttctctgctttttctggtatctttgcaagtgtacctccttttactggctccataacaattacaggcttattatgcttctctgccacctcgtagcattttctagattgtatgctttcattatcccaatctaaataattaatctgtaattgcacgaagtctacttctggatgctcactcaagactttatccaatagttctgcactatcatgaaaagaaaaaccaatattctttatttttccttcttttttcttttcttcaataaacttaaagctatcaaattttttagctacttcataatgtgacacgcctatattgtgtaaaagatagtagtcaaaatagtctacaccacatttttctaattgctcattaaaaatggtttcttgctcttcttttttctttaaagccattaatggaagttttgtagctatagtaaaactctctcttttgtgtctttttactagagattctctaagtgctatctcactttttcccatgtgatacacataggctgtatcaaaatatgtaaatcccctttctaaaaaagtgtctaccattttatttaaatgttccatatcaatagttgtaacatcattttcatcttttattggtaaacgcattaatccaaatcctaatttttttgcctccattgttttacttccccctttaaaacttgtttgttttttctctctactttaactattcttacaagtatataattcttgtataattatactttactacttggagttaacttcaagtcaatagatttttttatttttaagacaaatattataaaaatacagttctttaatattaatccattgcatgtttctttcaccctccaattctcaaacttcacaaactccaacatgcaaagaaatatatactttaagaaattcagtccattaatattactacaaatactttttagatatgtttaaaaagaaatttcacctaaaatatttataaaagatttagaaataggtcttgtgtctattttaaaatatataaaacagtggtaaagacttatttataagataaaaaatgaatagtgtataccctttttaaaaagttttttcctttttatatttgtgatacaatgttaaatataaaaaggaaaattttgtattaaagaaatcttatttgttgattttgtaacttcaaactcagtatcaatttgattttaagattatattttattaagtatgctaaataacaaatttttaaagattgtgaggtaaaaatatgaataataaaaatttagctatattaatatcaggtatgatgtttttttctagttcttcagcaatttttgcagacaatactacaaagcaagaaagattaataggtaaaacaagatatgaaacagcagtagaagtaagtaaattgggatgggttcaatcaaaaacagccattatagttaatggtaattctattcaaagtgcgctttgtgcaaatccatttgctaagctaaagaatgcacctatacttttagtaaacaacaacagtattgaaaattcaactaaggctgagcttaaaaggcttggtgtagataatgtgtacattgtagatagtggaaatagcatttcttctaaagtagaaaatgaaataaaatcacttaacataaaaataaataaaatagtaggaaacaatatatataaaatgtctacaaatgtacttaaagaaatagataagataaaaaaggtagaaaatgttgcagttgtaaatggactaaagggattatctgatgcagttagtatagcttctccagcagcaatacataatatgcctataatattagtatcagatgaaaacagcaatgatagtagtataaatttcttaaacaataggtctataaaaaaatcttacatagttggaggaaataagattttatcagacaatacagtaaagaaatatccaaacagagaaagaatcagtggttcagatagaaacaatactaatgcaaaaattattgataaattttataaagataaaaaaataaataatgtatttgtagctaaagatggtattaaccaagaaaatgcattagtagattcattatcaataggagtattagctgctaaagaaaattctcctataatgatatctaatggtagccttgtaaatagtcaaaaggaatttattaaaaataaagatatagatgaaataacacaagtaggaggaggatataatcaaaaagcatttgaagatattttaaaactaaaaaatgtgaacataagaaataaaactaaaaaaatatctttaatacaggctaaagaaatattaaaacaagctcttccaggaagcgatattttagtttgttattatgatgaagatgataatgaatatgactgcaaagttataaaggataatatcctatatgagatagaaattgatgcctactctggtaaaataatagaaattgaaaaagatgatgacttaaatgataataatttaggtacacaaaatatatcattggataaagctaagtctatagcattagatgctgttcctaatggtaatttaatctattgtaaatatgatgctgaagataacgaatatgaggctaaagtaataaaaaataagaaaacatatgaattagagataagtgcatttgatggaagaattgtagatattgacatggacaatgattctgatgatgactttgatgataatgataagaataactctaatactaatgacaacagttctattattagtgctgaaaaagctaaatcaataatgctagataaagtgcctggtgggaaaatagtaaaatttaagtatgatgaagatgacaaagaatatgaaggtgaaataataaaaggaaaaattgaatatgagataacaattaatgcaattactggtaaaatattagaatttgaaatagatgattaataaaaaatatatattctattaattattacaagcaataaagccataaatattgaatttttcaatatttatggctttattttattttttttaatttaaatctacattatgccattatatatctatgcactcttttaaattaaaatcttgtccatcatcccaaacctaataaagttagattttaaacaatatattgtgatataagtaatttgtgtagaattattgcgtgatttactcatgaagaaacaataaggttaatatataatttgactatattaagacgaaaggagacatatacaatgaatacaatattaaaagtaaataacataactaaaacttataataaagggcaacagccgagtttagataaggtatcctttaatgtatcagaaggtgaatttataggtataatgggagcttctggctctgggaaaacaactctgcttaatgtattatctacaattgataaaccaacaagtggagatattttcataaataatataaatttgaaatcgcttaatgacacttgtgctgctgattttcgtaaggataatttaggctttatctttcaagagtattttttactagatagtcttacaattttcgagaatatttcagtacctcttacacttcagaaactcaatccagataaaatagaaaacatggtaaagagtctagctgaacgatttgacatagcttctcaattaaataaatacccaaatgaattatctggtgggcaaaggcagagagcttcagcagttagagcaatagtaaaacatcctagtattctctttgcagatgaaccaacaggagctttggattctaattcagctactgaactactccactcactacaggaagcaaatgaggagttgaaaacaacaattttaatggtaacacatgatgcctatgcagcaagttttgcaaatagaattttgatttttaaagatggtcatatcattaaagaattaaataaacaaccgaataatagacatacattttatgagttgattattcaagaaattgcaaaattggatactaaaagataggaggataatttaatgaacattttttatatggcaataaagaatcttaaaaaaaacttttcattctattctctatatctactttcagtctcttttgttattactgtatttttcgcatttacttcattctctgttaataagataatgctagaaaaaatttcaactgatggtagagttgaatctatgtgtaatgttatttcgatatttttgatggcatttgtcatcttctatatggcatactcaaatcgattcttcttgagacgtcgtacaaaagaattaggcatatatgctttacttggctatcgtaagtttacaatattatcgctacttacctttgaaaatgtattaatttgtagtggagcttttattactggattggtattaggagcattgtcacataagggtattgtctttggaattacagcactacttaatttatcaattgataattcacagataccattttttaatataaatgcaataaacaaaacaattatctttatagcattagttgttttagtcttagctatatcaaatggtaaatttctttataagacttcacttgtaaaattgataagacatgaaaaaagtgcagaaaaaaaattaaagttcagaaaaattccagcctttatgggatttattatgattttaagtgggtattgtttatcactagatattcttcgtggagctaaatcagtatgggtaagtattggattttatcaaatgggcttgataactatgattatcattgtaattggtacagttctctttatcaattcctttcttccatatattatgcaaaagagtaaaaaaaataaacgtactttctacacagatatgaagataatagctattccaaactttatctatcgtatacgttcaaactctaaaactctaattatgcttacattactctctgctactactttgacagtttcaagtgttatggcactgtccttatactaccctattgcatctgtttcgcgtattgcaccttcagagatagaatttagagtagaaaaaaataaacaaatagaagatgtaaaacaaattgtcagtcaatatacgtctaatacagatgatattatttttacacagacaaatatttataaggtaaaatcttcatcaaaagaccttccatttgaatatgaaattggtacatctaagaataatttatctaatagtagttcttctaaagaagttatttcaagagaatcaggatttgaatgtatatctttttctgattattatactttattaaaggcacaaaatcgaacaaagctactaaaacaacttacccctttaagggataatgaatgtattttaatgaaatatcaaccaaataatgatggatatagtgaaaatggaacgatttatccattacttattaatggtaaagaaacacctgtagctgtaagggaaacatcattaaacaatgctatttcttttgccaatagcgttggaacacttatcgttaatgatagtatatatgagcaaatagcacaaaataaattaccaatgacaagcattttaagtattaatggtaaatcaattaaaaataatgaaaatttatatagtaatatttcagattatttagatggaagcccttatttacaaggatattctcacaggataaatgatttattatcaattaatagttctacatttctgttaatcggatttcttgtggtattattctttattgctgttggaagtattttatactttaacaatatatcagcaatttcagattcaacatctgattataagattttacagaaaatgggttatgataatatacaaattaaaaaaattattaaaaaacaagtattgccattttttaatattccgtttttacttggtatattggactgtatatttgctaccttggtttataagactgctttgatgcagaatttacttggaaattcattttcacaatacatacctgtgattattgcaattttcttaacttctgtagtgtatttgatatattatatacttactattaaatcctgttgtaaaattgtattaaaaaattaatatttaccaaatcgtcaagcttagaggtgtgacgatttggtatacttcatttataagtatttgatataatttaaaattatagattcttaggtttgatttagtcataaaattaatataattaactcataaggaggtgtataagattgacaaattttaatttaaaaatactatttttaggaaactacattctatcacttctcttcatgggaatatctacaagcactgaaacttatatgaatatccaaagcattattcccttaataatttcaacattattactcatagacatcacatatataacctcttgtaatgtccgagaaaataacattatttcattattttgtggattactagcactagacagttggtatttactcttatcatttgtaaccacaccaataggcactattatttttaaaatattaagcacagttatagtgtatgtctctattaaatttatatttttatttttgtttcaaggtagtggatacaatttccgtaagataacagatattttattgcttatcacctgcattggtgcaattgtaggagcatttatttctaacagaacgtatgcttgtatgtacggaatacagtttgttgttagtataataagctttttatatattattttttatcatttgaaaagggttgtttttgtcataaaaagcgaaaaaaagcctatatcgatttcagtatttataacaattataggattccttacttattatttttttacactaagaatatcaaatcatattggtaattttggaatctatctaactgtattggtattttttatgagtattcatggtattgcacttaaagaaaatgatagttttcctatttcaacagtttttaacataaaacaaagggctatatttctttttataagtattttagtaattagcttggtcgtactatttgccaatgggaatttttctataatattaatagctataaatgttttatttatgcttattttcctctgtaacattattttggagtttaaccttagagatgaaaaaaataaagtagttaaaaatagcaagtatacttttgcattagaaaaattacaacaagaagaacaactaaaaacagagttttctaattttttacatgatgacatattacagaacctgctttcaataaaaaacatgatgagtaagtcatatcgcccagaagttcaagatattatatatgaaacacttaacaatctaaatacatgtataagaaatcaaatgcaagactatcatcctgttattttaaaaaatttaacagtaaaagaaaattatcagaatttaattgaaagtgtttcttcatcctttccacaaaaaaacatttgtgtttcatttaagtgttctgatactttattcttagttgaaccatatgatatattgatatatcgactgattaaagaattattgacaaacgtgtataaacattcaaatggtagccatgcatggatagctttagcactagaaaaaaatataataaaattaaatattaatgataatggtgtgaaaaatacatcttttaaaacacctttagatataactaaaattacttttgatataataaaacacaaagggattatatcaattaaagaacaagtagaaaatctaggaggaacgataagtatttctgataatatacctcatggagtttgtgtacagattacaatccctatgaaaggagatggttcttataaatattttgttagttgatgaccatatgctttttgctaaaagcttgtcaattgcactagaagaatacgaagaaatcgaacagttttattccacacaggacatccataatctttcagaaatgattcaagataaaaaaatagacattgtcttaatggatataaaccttagaggcttaagtgaatgtgatggcttaaaagtagcttataatttattagagactaattcaactattaaaataataatcttgactggatacgacctcccagtttataaacatgaggctaaaaaaataggtatctatggattcctaaataagaatattagccctgatagtttaattgattcattattaaaagtctatcaaggggtaacctgttttccatctgaaaatactgaagtaattattgaagatttaactaatatggagaaaagaattttacagcttatctgtagtggtaaaaaaagaaaaataattgctgatgaattgtatataagtgaaagaacattatcaaatcatttacaacacatatatgacaagctagatgtttcatcatcagttgaggctattacaaaagccattaaaatgggttatatttctccagtatattaaaaaagtgagtgtctcaaaatgaactttctagctcataaggcactctcctttgtattaaatcaaatatattttcatcatttaaacaattaagaagaggcttctctctattttgagacaactccattttaatacactatttatatttatatataaacatattttaaacaactaaaaagcaactaatatctcaatacatatcttcataacacatatcaccataattacaagcagataaagaactctcctcatttaaatacgactcaaattcatacccaaacagaattgttggttctatatatatttccatatctgtatatctccatcttcttacctttgcctctataaccttgtaaaaatcttctaaactatacccttcttttaatcttttatctataagtgccttagttatactcaaatcagctttaaaattttttcctgattcactatttaattttcttataataatttcatgtatgctttctggatttttataagtagaatcttcagtcaaatcttcatccaaattttcaaaggtatttttatttaaattctttttatttaaattattttttaataattcttttttctttgtctcattttctgtttcatacccagtatgaattatcaaatcataatctttgtctatactctcttgatttatacggctgtatgtgttggtattactgttcttgaacaactcatctctatgtttatatttcattgttttttggttattgttaatagttgcatcaatgtatttctctatatttttgaaaatatcactattctttgttacaatttctgcattactattttcagaacaaacataactatatacagaacaacaatttccctttactcccctacttattaatctcaatatacctaaatctataaattcatttacaagtctacttattgtagatatagatacatcaaggtcagatgcagctttccttactgtcatcataaattgtcctcttggcagagttccttttaatctttgtatattttcttttctcattacatagtgattaaaccttattctatttacatctcttttttcattaaaatataatactgctgaatttaattgataaaaactattactcatattcccactcctccaatttaaatagataatttgttgtaaagtttttagatttttaaataacttattaaatgattatttttattaaaaagtattctttgatattttcattttaaagttttaagtataataagttaatagtgtagatttaacttttttatttaaacaataaacttaatattatttttaatataataattttattaaatttagtatgtaattttttaatcttattttattccctctatactcttatgctaaataataactttgataatatttccctaacttatgtttcaactggtttatattgcaatttatttaattacagcttatttgcataataattcgtccatatcataagttgtgtatttatataaatacacaattaaaaataaatcactatggtatactaattattacgaagactatacttatatgcaaaaataaatataaggcatcttatatcttttattaattataaatatcttttatcaattataaaaaattaaacgctatcttatttatcataaattgcaaaaacataaaattttattactatattgctataaattaattaatacacattttacacaataaggagggctatatatgacaaatgctaaaagtaaaaaagaatatctaaatcgtatttgcaaagtgcaagactatatagaagaacatttacatgaacctctttctcttgatgaactttctaatatagcaggtttttcaaaatttcattttcatagaatcttcaaagcaatagaaaaagaaactttggcacaatatgtaaataggctaaaactagaaaatgcaactgcttttcttattcatcgaactgacatgactgttactgatattgcacactacttcggctttactgattcagcagttttctcgagagcatttaaaaattactataaaataagccctataaaatatagaaacaattatagcaagaattgcaaagaaccatataaaatttctcagtacaatagaagcatatcaaaacctaaatgtaagaatactagagaggttaaaggtgaaattgaaattctagaacttgataatatgaatactatttacactagatatactggttcatatggtaatctaaccagtactttcccaaaacttttagaacggttattcacatatgcaagtgagcagaatctacttggacttgaaaacacacaaatattagccatttatcatgataatccacaatttacacaggagcatcaattaaggactagtatttgcatgaccattccagataacattgttgtcaaagagaatgacaatcttggcaatatgataatcccttctggaaaatatcttgtgggacattttgatatttcaaaatctgaatatagtgatgcgtgggattttatgtataatgaatggctatcaaatggtaattataagctacgtgcctccttcccttttgaagtatatcttaacaacccacacaatcaccctcaaaatagacactttgtcgatatatatttacctatagaacctttttaataacctcacctaatctattcttgtattaaggattaatatatccctattttacggtttgataaaattgataaaatgaggtgaaccaatgaaagaaataaaaattaatggagcaaagatacacaatcttaaaaatatagatgtttctatccccaaagataagcttgttgttgcaacaggtgtcagtggctcaggtaagtctagccttatgtttgacattgtatttgaggaaggtcgtaaacaatatctgcaatctttaggtatacttgcaggtattgatagtgaggataagtttgataatattcaaggtttagctcccactatagctgttcaacaaaatattattcgccagagcaatcctcgttcaacagtaggcacaagaaccaatattctcaacatgcttgcactattgtattcagtagaaggtcaaataatgtgtactatgtgtgatactcctgtaagcgataatctaatttgcaataattgtgggtatgaggaagaacgattaagaccaagttatttctcatacaactcttcagatggaatgtgtatgaagtgctctggacatggtgcatattttgagattaatattgaaaaattagtccttgataagcatgataccctaaaacaagtcttagatagagcaaagattacaccaggatatttgagagtattttctaaaaaattcaacgattatttagacatacaattcttacaactacctgaagaaataagaaatgaagtactctatggtcattatgaaaatggtaaaaaaagttcctctttatcaaaggtatttcacaatcgttacaaaaggggtgaggatttaaatggagtttatactatgactgcctgttcagattgcaatggttttaaaattggtgaagaagcacgtagagtacttttaaacggaaaacatattggagaacttggaaaaatgacgattttagaaattgatgatttccttaaaatcttaataaaccaaggtaatttaaacacatttggtacaaatcttgtaaatgatattttatccaaaactcgacatttaatagaatcacgattaggtcatctatccttataccgagaaatgtcaactttgagtggtggggaaatgcaaagactatttttaaattcacatctcgattcagagatggactcattaatttatgtgcttgatgaaccaacagctggattgcatgaatcagaaaaaatagacatcttaaaatcaataaagaaacttaaagatttaggcaatacggtcatagtagttgagcacgataaaaacacaattgaaatggcagaacatattattgatattggtccaaaagctggtgttgaaggtggtcaattagtatatcaaggagatttagaaggtctacttcaatccgacaaatcacttactgggcagtatctatctggaaaatatccaatgcctaatagaacaagcaataaaaatattacacatactgataaaataccttgtataactattcaaaatgcaaatacaaataatcttaaaaatgtaactgtatcattacctttgggtgctatggttggaatatctggaaaatcaggtagtggcaagagttcacttatatcagacaccctacttcctcttcttagaagccaatttaataaccatactatcaataatcaaataaattcttcagatagcgaaataggtgatgaagacgattatgcagttattgaaactattgcagatagactgattggtactaaacatatttctggatattcagagatatctcaatctcctattggcaaaaatatgaactcaactcctgcttcttatattggtatatgggataagatacgtacactatttgcaggtcagccagaatcgttagaacgaggatttacagctggtcatttctcatttaactccaaaggtgcttgtcctaaatgtagtggtagtggatatgaaaaggtctggttaggaaataatctaagtatagaccatatatgcagtgaatgtcagggaaaaagatttaatgatgaatctttatctattaaatataaaaataaaaatatacatgatattttaaatatgagtgtttctgaatctgtacatttcttcaaggatattccaaatattgtttcacacttaaatgtattagaacaaataggtatggggtatataaaattaggccaacctacaccgactttaagtggtggtgaatcccaaagaatcaaacttgcaaaagaaattggtaaaaaacgaaatggtaatatcctttatgtattggatgagccaactactggtctaagtctatatgatacttctaagttgattcaattattagatgaattggtggaaaatggaaattctgtaattgttgttgaacatgatatagatgtattaaatgtttgtgactggattgttgagcttggtccagaaggtggtgacaaaggaggttatataattgcagaaggttctccaaaaactctaaaagaaaatccaaaatctataacagggaggtatctttaatgaataaaaacaattgcttagatttaatatttgaaaaagtagacccttcaagtgttggcatgagttcagaaaagctctcacaactggaacctttaataatctcacaatatagtaatataaatggaataattattgcaagaaaaggaaaagttgtctttgaaaagtactataatggatataatgctgatgatacttttcatgttgcatcagttacaaaaagtattatatcagccttaataggtattgcaatagataaaggatatataaaagatgttgaccaaaaggttgttgattttttccctgaatatacttgtagtccttctgaaatatgtaaaaaagcagtaactatacgtcacctacttacaatgactgcaccatacccttttaaaaatatgactgagtctttagaaagactttgcaaacaaaaagattggataaaatataccttgaatcaacttggtcaaaaaggcgaaattggtactttcaaatattcttcagctggaacgcacctactttcagctattataacaaaaactactggaaaatctgctcgtgaatttgctaatgagtacttatttaaacctattggtatgaaagttataccagattatgatatgaaagattttggttttgaagatttctttggaaaaaatcttaagggttgggcaaaagatagacagggttattctataggtggctggggacttacattgagtgctagagatatgttgcgatttggttttctgtatttaaatgatggtatttggaataataaacgtattatatctaaatcgtggattgaagaatcggttaaaatgaatagtaatgaatacggttatctgtggtggatatgtaaaaaagatggtgttttgtggtattcagcaatgggaactggaggaaatgctatttgttgtattccacaatatgacttagtaatagccataccatctaaaatagtgtttaaacctcgtgatagatgggagtttattgaaaaatatatacttacttctataatagattaatcactcttagataaactaattactcttagataaccaaaccctccactataacaccagacttttgtttggtgttattatgactaatactatatatctaaaaggagttgaatactaatggacacttacacgacatcagaggtagcagatttaattggtgtacatcctaatacagtacgtttatatgaagaactaaacttaatacctaaacctaagcgtaataccaatggttatcgtatctttaatgattttcatatagaacaatttagatttgctcgtacagccttgaaaattgaagtggtacaaaggggattaagaaaagatgcccttgagattgtaagaacatcagcgaatagggactttgataaggctattagtcttgtaaatcaatacttgcaacaattagaaatagaaaaatctaatgccgaggaagcacttactattgttgcacagattttaaatggaaatactccagaaacaaataaactctttttaactagaaaagaaactgcagaacacttaaatgttacaatagatactttaagaaattgggaaatgaatggtttgttaaaagtaaaaagaaaacaaaatggttatcgtgtatatactgatgaagatataaaacgacttaaaattataagcgcacttcgttgtgcaaactattctctttcagctattttacgaatgttaaatgctttatcttctaatcctaatactaatattaaaactgtccttgacactccaaaagatgatgacgaaattatctcagtgtgtgacaaactgataacttcattgaaagaagctgaacataatgcaaaaaccatgaaatctcatcttcaaattatgaaaaaacaattttcctagccctccactctaactccagactttgatttgtgtgttatccttaagagcaagaaaaattcaacacacaaatcaaaggaggaataggatggaaaacaaaaatactaattctacatggaagaaaaaagtcattctttttttagcaagtcaatatatttccttatttggctcatcacttgtacaaatggcaatgatatggtatgtcacacttcagacatcatcaggtgtatgggtaacagttttaactgtatgctcctttatacctcaaatgataatttctttttttgctggtgtatgggcagactactacaatcgaaaggtactcataattgtatcagattcaacaattgctatatctacattagttctaattctatttatgatgtcatcaaatggcacaacaagtgaattaatagccatatcagtaatatctgttatacgttcactaggaagtggtgtacaaacacctgctgtaaacgcaatgattcctcaacttgtaccagaagaacatttaatgcgttttaatggtataaatagtagtctacagtctatagtacaatttatagtgcctattgtagctgctgcaatacttggatttggtaataaaataaatcaagttcttttaattgatgtatttactgcaattattgctattgtattattgatattcatcaaaattcctaaacataatataccaaaacaaactgaaaaagtctcattttttgcagatatggtatcagggataaagtactgtttttcagataagttcattagaaaagtgcttttcacttatggagcattcatgcttctttgtgttccatcaggatttcttataggacttcttattgaacgaacatttggcaagggttatatatacctgtctattattgaaatgattggatttttagttatggttttaggtggattgattataggagtttttggtggttttaaaaatagaaataagaccttttttctagcaatattatcctatgctattttttcaattattctaggtcttgtaacacaagcttggcaattttttatatttatgttttttacgaatttttcaattccaattattcaagcatcagctatgactatgttgcaagagcatgtagcaccacaaatgctaggtcgagttcttagcttacctattattatatatactggttttattcctcttggtatgatgattttcggaccaatggcagatgtaatttctattaataatttaataatcgtagcagggattatacttttattttttgctttggctatcccctattcaaaacaattttacaagcaaggaatatctaagtcaaatgaatccgagtaatatatttaaatagtttaactcgatttatctggttaaaaatgagggggcttaaaatggactttttaatttatgaagaaaattttttatatgaaatcaaatatattttatcatttcaacattgaaaaataggtttatctttattttgagtccctctctttatagcaaataatattttgatactatctttattaactttatataataatacctcatataataatacctccatttatatcataaattaaatttatagtacaaatggaggaaaataaagtatttatatagtttaagtacctattaagttttccactaagtagctctaattgtactgaatttcttactaaattatattgaataattataaaataaaactaactattacactacataaattaaagtatacaaattgcactacataaattacactatacaaagtatattaaatcacctattaaattgtcccaattataattatactgagttatctactaaaagataactttctttttttatctaaaataatatatatcataaaccatactacacaatgtacaaccaaaattacaatatcttttataataataacattaccattaataatctccataataccattaaatgtagcaactgatggcattatatagcataaattccctataccgctggtattaacccctagaagatatattaacaaaggagcacctataaataaaatcattactattttaatataaacaattcctaccataagaccttctgacaactttccaataaataaacctataagtgatgaaataaatgctgaaaatacaacgagtaacaacatcattatcatatctaatattgaaatatccaaacatataaatacagttatcattgaagataaacacccacataaaagacccaaaaatactttttgtataatatactgacttctactctgtggcaaaacttcatttataaatgatattccatcttctttttcagatataatattcattgcattaaaggtacatcccataaacatagcagtaattaaaatcatagcaataaaaacattctgaaactcttttaaaatactatctttaggcaatattgtaacctcaacatcttttaaatcaccctttagtctaaacatctctggcaatgtctttccaacattttttatagcattaatctcatttccataaagcatagtttttattcctttaccatctctaacaactccaattgtgtccgttttaatatccttaatttcacgtattaaatgcatttttgtgtcatatacacttaccataccatacttcttcaaccactgctctgtttgtacaggaagtgtatccttcactataccaaaacgtatctctcctaatgaagatatatcaattgttcccataaaatttattaaaatcgccataacaactggtaaaaagaaggaaattatacacattttatctttttttatactctttaactggtaacgtaatcctatcaagattatccctccctaaccaactctttattaaaaatatattttacaagtaaaaatagaactattattgtcaaagaacacactacaaaataaactaattcttttgaaaaattcatgaaaaacgcatttttaagctgactataaacatgatagaagggatgatatttaatccaatctatttcaaaagatgtatttgcagatagaaatataggtgtagttatgaatacagcaaccacaagatatataagagaaaattgcttaaaatctctcaataacattgagcatcctattccaatcaaagacataataattgataaaatactagcttgaactaatacttgtggaagtatttttactccttcaaaaaatccaatattaaatactactaaaagaactgtaaaacataggtcacatatcaaaaaagcaaatatctttgataatataaaaagacttctttttacaggtaaaataccagtaatacgcattactcccatctgcttttctttaaataataaagaggcaatccctaaaaatccaatagctacaatttcaaagaataaaatctcacaagtcatgtcttttctttgttttatctcagatgtatccttatcattaatttgaattattgcattgttgtctgatattttgctattatggtctttttctgatgataataatgacaatgcatagtcagctctataattgtcaactcctttaatactttcatgtaaaattactttcggcttactggaactcatatcaatacaaactgcacttgtatcttcatcaagttttgcttttaattcacctatagaagaaacttgattaattaatggagatgcactcatgcttatattctctggattatatagatatacattattgtgataactatcttcatccataaactttacataaccaaaattaatataacacgaataaagtatgagagagccaagtgtcagcacaaaaaatttaccataaatcatcatccaaaaatctttttttactaaggtaaaaaatttagaatacattacactaacatccttcctgtgtatttaataaaaacttcttctagtgtaggttcttttgaatgtacacttaagatttcatcatatttaaaagttattccagattctaactcttgtatatctacaatttcaatatctcgatttccattatatacaaattccacttcaactttattattgctatttttcatttttaaatttttgggtttatctattaccataatcttgccatctgcaataaaagccacattgttacacattaaatctgcatctagcatattatgagtagtcaaaaagatagttgttcctttttttcgttcttcttcaataatcttacgaaatagtacagctccagatgggtcaagtccactagtaggctcatctaaaaataacaactttggattacttaccaatgctcttgccatgctaatacgttgcttcataccttttgagtaggatgatacaggcttatttataaactctttcttaaactctaacaaatctaagagttcatatatgtctctcctttgatttttaggataaaaagacgaaaaatattctaaattatcaattgcacttaaattggtatataaataaggaaattcaaataaaacaccaatcttttgatatagagactctgtatatgctttaacttccttcccaaaaagggatacgtgcccattgtaaccttttaaaacgccatttaagattttctgtgttgtggattttcctgaaccattaggtccaaggaatccaaagatttctccttcttttacttcaaaattaagtccatgcaatatctgtttatcttttccataagaaaattttaactctcctacttttatcatctatcataacctcctttatcatttttttgtcgtctatcccaccattttataaatttaattttaagcggaatagaaagcaatattatcaatataatagtcaaccatgtataccatttcataagtactcccccttgtaaccttatttaattacgcttctattttttaatttatttaacctattttatttctatttggtgaaatcagagtgtctctcttgtgaaatcgaagtgaaataataaaaagcttaataaaaaatcttgttttcatcaggaaaacaagacttttcattaaactttttattagactttttcattaagttttttattttattctctttaaatacttacgtatacaaagaaaaatattttacatcagatacttataatttataaattaatactaaattattcatcaattggaatcataaaataaaactctactcctctatcacgattattcactccatattctaacccttgcattgtaagtatttgtgaaacaattgcaagccctagacctgaacctcctttacgctgagattgaacactacgataaaacttagaccaaatctttgaaatctcatcttgctctataatcctaccatcattataaatttcaaataaaagcaagccattttcacatgtaatcgataaatctaaattaccattatatacaacatgcttctttgcattaataattagattctctactacttgttccattctcattttatctgccactacaaaaacttcatactctggcaaatcatatgtaaaataaaaattggcatctggtatatcaattaaaagacgacctgccacagtttcaacaaactctataaaatcaaaacgctctgggttaagtttagaaactcctgcttccaatgcagataagtctaataatgatacaatcatattgttcattctatcagtttcttctattataacattcatataatttttctttttttcttcatcaacttcatccataagcccctctgtatacgcacgtataatgccaagtggagtcttcatttcatgtgaaattgcatctaccaactcctttctttgttccaatagcattctttccttatttacatccttttcaagttgaatatttgcactttctaggtctgataatgcctgttgtagatttgtagacattgtattcaggctcctagaaagttctccaaattcatcattagtatttacagtacatggattagaaaaatcaagttgggacatactttttgcagatttatttatagatgtgattggttctgaaataaattttcccaataaaaaatcaatactcataataaatataaccagtattataaaccaaatccaaaattcaaatttagagtttatcgaaaattcttcaacaaccagataaaataatataattaacgctcctgataatttagaaagtaaaaacactttttttctaactgaatatagtccaaaattttgtttaatccaatttgaaatatctacatttttcagtttttctataatctttcttaaactattcattccttaacctcaaacttatatcctgaacgaattaatgtaactatatggtgtccttcactaccaagctttttgcgtaaggtttttatatgtgtatctacagttcgtgtgtttccttcaaaatcatatccccatatacaatttaaaagcttctctctggaaaaaacttgattagggttttccataaataaacgcaataattcaaattctttatatgttaaatcaatcaatttatcttctacatacacttgccttgatgctaccataataaaaatctttcctaaactcaatgaatttttgggaatatcagtagtgtatctacgtaacaaggcattaacttttgctaaaagtacttttgggctaaatggttttgttatataatcatctgcgccatattcataaccctttaatttgtcctcctcttcacctttagctgtcaatatgataataggtatattagtcatttcacgtgaaactctacacactgaaaatccatctaaatacggcatcataatatccaatatcattaaatctatattgttgctctttaatattgtaagtgcctcgactccatcattagcagttatacaagtatatcctcccttttgcatatattctacaataatactttgcatccttttttcatcttctacaactagtattttagccatttctatttatcacctcttttttgtaggctttattttagtttatattaatttatttatttttcaactatttttttatagtatttttatagtattttttatagcattttgatagtattttttagactattcttaatggaattgatatcatagataaaaatagcctactaactttttctatgttagcaggctaaaatatttctaataataattatattattttgtcactattctattttttcgattaaaatacattctaaaacaaatatcttcaattaatgaataaattgcacttgttataaagtacagacctatggctactggagttctaacagttagtataagacttgttatggtagtcaccacagccatttgtttgttaaactttacttgagaatttatttttaaatatggtatataattcactaaatttgaagctaacataattaatgtatatatacaaggtaatataaacaaattatcaaatgtacctaaattagcaatccatggaattataattgttgtaaattcctttgtcatatctaaacatacatgatataaagcatatactactggcatttgaaccaaaactataagacatcccagcatactcttcatactttctacagaacttacttgtatttgcttttccaattctttagtatcattcttatacttttcttttatatgttccattttttcagctaattcttgctgtttttttacagaaaatctttgttttaatgatagtggcataagtactaatttaactattaaagttataagtacaatagaaattccaaaatcacctgtaaaattaaataatatacttaataatccttgcaatatacttgaaatgaaatccattttattctctcctttttatttttaaactttagaatttataatagattcatttcaaattaaaacaaactacaatacctccaaatatcatatttctgaaaaactatatactgtttaggcaaccgttcttcagaatatgtaattctatttacaaatatgtctcttattaaaacatacttaattttatgatttaagaggtctttacaaaaataaaatatacttccaatgatagataccaataatgtcatataaattagtacatataacatactatccatatctaatctcatcacatcacctcttcatcacttatatttatctttagacaatttcaaatcctaaataattccaacatttatatttagttttaaatataaataattatagtatagaaaactcctaatgtaaatatatagattattatatttatcatttttattcgtcatatttacatttataaagtatataatcttatcactcttaatttttaataaaaatcacctaaagtattcttttttatctctgaacaaaacaatattgggtttttatagcttatttttaaattataatccttaatttaatataagggctcaatataataaatcttaatatatataaatcctaatatatatctctcttaatataatattaaatacaacctttcatacaattttaaatataatgtctaatataatcccttagtataatcacatactttttgatacaatccttaatataatcgttaataattgtatactaaaatcaatgactttttttctgattaatgctaaaataattaaaaatagaaaataaatagatttttccaaaaaataaacggaggttacttaaaatgataagtgattctatatcaaaaagacgaagtatcagaaaatataaaaatcaaagcatttcacatgaaactatagagaaaataattgaagctggaataaatgcaccttcatctaaaaacaggcaaccatggcgttttgttgtcatcactgaaaaggaaaaagaatctatgcttaaagccatgagcaaaggtattcaaaatgaaattaatgataatgggcttcttccaggaagtcgtcaacatatcgctggtgcaaattacacagttgaaatcatgaaacaagctccagtaacaatttttattttaaatatattaggtaaatcacctttagaaaagctatcccctgaagaacgattctatgaaatggcaaacatgcaatcaattggagctgcaattcagaatatgtcgcttacagctgtggaattaggtctaggtagtctttggatttgtgatgtatactttgcatatcgtgaattatgtgaatggttaaatacagatagtcaattagtggcagcaatatctttaggttatcctgacgaagaaccatcaagaagacctagattacaattaagtgatgtgactgaatggagataaatagttatagtaagcaaatagtgcaaacagaatttatattaggtgaggtattttgatgaaaaaaattattaaatcttttacattttgttttttttaattgcattatttgagatttatatccaccaaattggtcaagactcaaaaagtattattctaataggattaaatcctattttgtctattatttctaccattgatagtttttttgtttttatggattcaggcatgcaaatcccatgtagaacaattacagggtcaatttcgatttattggtacatagcatctatactttcttttcttatttatggtataattttagatttaattagaatagttatttccaaaattggaaataaaacaaaataatcatcataaatagtgcattttcttgagctattaaacttcaccggatatagagacataacatatacttagcttcagaaaatgcacctttaaatcttcatatgaacattattttacttacattaatttaatgttacttaaaaattaatgtattgtatttctttaaattaattttctatatttcttaaattagtttattatacttctttagattaattttctatacttcctaaattagtttattatacttctttagattagctttctatacttcctaaattagtttattacacttctttagattaattttctatacttctttaaattaattttctatacttcctaaattagttcattatacttctttaaattaattttctatacttcctaaattagtttattacacttctttagattaattttctatacttcctaaattagtttattatacttctttaaattaattttctacacttcctaaattagtttattatacttctttaaattaattttctacacttcctaaattagtttattatatttcttaaattaattttctatacttcttaaatattgtcttatacctctgcaatcttattatggttactcatcaaattattttgctttatagtcaaggatttcatttcatgaactgcaaagtatatacataccattgccgctgctgcatctgctattggtcctgcaaacattactccatcaattcccataaacattggtaaaattactatcaatggaattaaaaataaaatttgacgagtcaaagaagtaaaaagtcccaacactgatttcccaattgatgtaaagaaagttgatgatactatttgaacaccatttataaatgttaagaacaagaaagttctaaaataatgttctgcaaatataaaataagtctcatttccgttaccaaatatagacgtaatttgtcttgggaagaattggaaacataagaatgcaataacagatataatagttgcacttcccactgcaaacttatatgcttcttttacacgattatacttttcagccccataattataccctataattggttgcataccttgtgatataccaataattatagatataaaaatcatatttactttaataatgataccgacacaagcaagtggaatctcacttccataaactgacctagccccataatatgccaatgtattattcataactatctgtgttacagtcattgctaattgattaaaacatgagcttgaacctagcgcaaatatatgtttataaattatactatctaatttaaaacttttcttatgtaatttaatatgttgaaaattctttatataatgaacacttattccaaaagatataagttgcccaataacagttgctaaagcagacccagcaattcccatattaaaaacaaaaatgaataatggattcaaaattgtattaataactgctcctattaacatacaaaacatagaagcttttggtctcccatctgcaagtatcaatttactcattccagtggacattataagaaatggtaatccaattgatgtaatttttgtatatgtgtgtgcataaggtagtatttctgatgtagagccaaagaattttaatagtggtgttaaaaatattgatactactataaataaacttattccaaaaacagccatcaagcatatagaatttcctgctgcttttgtagctttttctgaatttttagcacctaattccaatgaacacttagacgctcctccaattcctaataataatgcaattgcagtacatattgttgttagtggaaaagtgacatttgtagcagcattacccaatacaccaacaccttgcccaataaatatttggtcaacaatgttatataaagcacttactaacattgctataatactaggaattgcgtacttagttaataactttgaaaccttttcatattccaatggctccttatatttttcttccattttccttcgcctccaattttgcttcttcattcatatcaatagctaaaaatgcaactttctttaacattgacataaacaactcttgctcttctttctcaaatgaactcaacaactcctcaacatacccatttgttatttttagtatttcatcataacattctaaagatttttctgtaggatataaatgccatgttcttttatcctttacacctggttctcttgttataaagccttctttttctaaatttgccaaagctctcgttatattactaggattcacaagaattttctcaaatatagtgtcctgtgtaatacctggattattacatatgtgtaatacataaaaatattggctattattgattccaatatccgccaatttcctgtcaatataatttgtattgtatctatttataatggaaacccattttaatagctctctcatattctctcctttaatatctattgtcctcatttttttgcgttcgcaataatctatttgctcatgcaattattttactgctaattttatactttgtcaatagcacacaagtttatatttaaaccataaagttactataaattttatatattagactcttactttaatttaactatttttaaatcttcattgatatttaattaccttttatattaatttttttgcatatttatcaataattcctaattctttttagcttattttaaaaagcatcttgacgtaatatttattatctgtaataataaatatatcgaatcgatatatatctgattgataccaggaggtaatatgttagaatacattattttaggatttttaatggaaaaagaattaagtggatacgacttaaaacaaataatgtcagaaagtacctcgtacttttttgacgccagctttggaagtatctatcctgcacttaaaagattagaaacaaaaggatatatacactatcacgaagttatagatggtagcaaattaaaaaaactatattccataactaatactggtaaagaagtatttctcgaatggttaaagaaacctataaatttttctaaaacaaagcaagaccaccttgttaatatattcttttacaagtatctacccaaagaaataattgaaacaaacttaaaaatgttaataactgaagtagaattacttctaaataaattaagtaaacaaaaaattgatgtagaagaaaatcattgtattgaccaatatacatatatgtatgccacaatgatttatggagttgactattataattttgttattaattggtgtaaagatttactgaaaaatctataagatataatttttagaaataaacatacataataaaaggagatggactttatgaagcttttaatacatgatttaactgacaaagaattagaaaagttattacccaagcttgatgacaatataaaaatacttccaaacacaaaagaaatccacaaatgtattggtcgttttggttgctggattaaaactccttctgaatgtgttgtaaaagattattacagcaacatgggtaaacttataaatgaatccgatggaattattataataagcagatgctgttacggagggtttagcccttttgtcaaaaacgtacttgataaaagcattaattatattcttccatactttgtaataaaagataatatgatgcgtcataaaagcagatatgataaacagataaatttaaaagctatattctatggagattgtattacagaagctgaaaaagaaactgctacgaaattagtaaatggaaatgctataaatttcaatataaaagaacactctgtttgtttctatgaaaatatacaggatataagaggtgaatccatatgaatatagtaatgataaatggtagtccaaaagtaaataaaaataattcacagtattttttatctgaattaaaacaacttattcaaaatgataataaagtttttacatttaaagtagatagcacatctaagtatcctgacgctcttaatgccatacttaattgtgatagattaataatagcatttcctctttatgtagatggtattccatctcatttacttcattttttagagaaatgtgaaaaatttttaaaaacacaaaataaaaaacctattccagtgtatgcaatagttaactgtggattcaatgaaggtgaacataatcatttggcaattcaaatgatagatcattggtgcaaaaaaatcaactttacatgggttcaaggtattggaattggagctggggagatgtttggttcactagaatccgtacctttgggtaaaggacctaaaaaagatttaggaattgcattaaaagaactttcaaaaaatatacttagtgataatatacatatagatgattccaacaaaagtactatttttatttcacctaacttccctagattcctatataaacttatggggaatcatcaatggaatactcaagctaaatcaaatggattgactaaaagtgatatactaaagaaataaaattttacttcaacaaatactaaaaaccgtcaagcacgaataaactattcatcttgacggttttttatgttatttatattcactagacatgggataattcactacaacattgattatctagtctaatatttatcttattctttttgtaaaatccaagttgctccaacaaggtcctgctgtaaatcagtatattcatttttttggctaataacatattgttcaaacatatctttttgagaaggatattttttaattagctcatttgcacgagttataatccagttcatttcctcttcaacatcattttcaagttctaaacatggtatacattcaattagtttcagacctaattctttgaacaatatacaccactcattgtaagtgggatacaccctctcaaaattaagctgttcatttgtagatttatctactacatatgcatcatcaattaaaatgaaccccttactttttattgtaggtaatagcttacttatagtttctttataattacctaaaatatcccctacagctccaaaaatcacacaatcataatcgtgctcaatttttacagaactattagcatcattcatttcaaaatcacacaaagcatcaaccttatattcaatagcctttcttctcgcataatcaataaattcaggtatcaaatcaatacctttgatatgtatattcaactcttttgcaagcttcacagatacagcaccttttccacaagctaaatccaaaacttttgtatcctcattaaaaggtatatgctttctaaataattgtaacatttgttctggtgaacttcctaattcccaaaaatcttgtaataaataaggcaaataaggtaaaatatcagtagtatcagaagttagtgactctgccaatttttcttttacagtattattcattttttcaacctccaaaatttaaattattattcaaaagtaatattattttatatacttcttcataggtactacaaacagtggaaaatgcttttgacctttgtatttttcaattcatttcttttctttatgagctgtaataattgtataactgtgagcgtttactgttataatacaatcatatacacttatataccagttttttccctttctattaataatggcatttggagattctattttagttttacaccagttcactacatcatttgtctccaaagaaagatttttcttaattcttacaacgcctaactctgttgtatgcaatctatctaggtttttaagtaattcgttttctacattcatttttattaaaacactttatcctttgcaaaattaaatctattatttagtactattttatcatagtattgtgtattttatcataatcttatagtaaaactatttctttcctacagactataaattatttataaatacatacttttataaaactttgcctatataaatccacctactttatacataatcccttcttttaaatgattggaacccaaaactgaatttcactcaaaccattcttatcagttttttctccgtattttacaaaatcatataaattattttcattaaactggcaacttgaattaaggaaccattcttgatagatatattctacaacattttgcatactatcctcatttttcccaataaaagtaaaaacaatataattacttttcggtaatacgaatttttccattccattaggaatttaccaaaagtagctacttgaacacctgcaatatatgtaaatgtaggattattttcaatttctttaaaattactataatcattaactccaattaaaaaatccaagtctaccttgttttctatcaactctttatttttatgcaaatccctccaacattttccaataacatgaaatcctttttttactttaccagaatagccaacaatatttatatctgtacaattaacttttttaacatctaaaaccatacctccatgtaacctttttctattattaatatcaaattttaattgtagtggtaaaaaatcttgatgttttctaaaaaacttagggctatgcttaaacatttttttaaaccctgttgaaaaagaacgttgtgtgtcataccccgagattaaagcaatttcaataattggtttttctgtaaaaatgagcattcttgctgcttcagttagtctacgtctttgtatataattatgtatactaaatccgacaactgatgtaaacattctatgtaaatggtactttgaatagcctatctctttagaaattacatttaaatctaacatctcatctaaaagatgtttttctatataatctaaagttttttcaatggtaatcaaattgttatccatatagcacccctcctattttaaagatagcatattattttattttgtttttcacattctttgctaatattttgatttattttatggcacacaaaagacacttctatttgaagtgcctatctactctgtatattgagcttcttatttcaatttattataatcttcaatagatacaggttctagccatttattgaaagcaccttcagcagttacctcgtctacagccaactgctaaattctcttctataccttaatctaacttttccacttcaagtatacaacttgaagttagctctaaatcaatagtttttatcacaacaatttgattttaaatttaaatttattcttttaaattatcatcatctattatagattttcttatattcaataactggtctacaaattggttagcaggagtatttaaaatattctcaggagtatcatactgttgaacaactccatgatttaataccaaagtctttgttcccaaaatcaaagcttcataaatatcatgcgtaataaagataatcgtaactcctgtttttttatgaatttcttttatctctttttgtaattgctttcgtgtaatctcatcaactgcaccaaaaggttcatccattaataaaatttctggagaagaagctaaagctcttgcaatccctacacgttgttgctgaccacctgacaattctgatgggtaacgcactttcatatcatttggcaatcccactatttccatccacttgtttacagcactttttacttctaatttattctttttacttaggagatttggtacatatgaaatattttcttcaacagtcatatgaggaaaaagaacacttccttgtacacaatatcctattcttcttcttaatttaattaagtcctcgtttttgatatctgtttggtttatcaaaatatttcctccatctggcaaaatcagaccattaatcatttttaagagtgttgtcttaccagaaccagacgaaccaattacagtcaaaaactctcctttttctatatctaaattaagattatctattatagttttatcattatattgttttttaatatttttaaattgtataataggtgtcattatatttcctccaatttataaaagacctttcttattcagaaactcacaagcaacttctctaggttctaaattgttgttttctacgtcataattcattttagccatttctttatcagtcaaaatatctccaaccatcttaaatacctctgatagttctggattttcctctaatacttccaaacgaacaacatttccacattgataagatgggtagaaatttttatcatcttttagaactataacatctgaaacactatactgaccatcagttgtaaatataggcattacgtcaatcttaccttcattgatagcttggtattttaatccaatatctaaatcaactgtatctttaaagttcagtccatatgtattacacaatggagtatatccatcctctctctcataaaagtcatattcagctccaaatgtcaatttagaagatacattttttaagtctgatatattttttaaattatatttatctgcaacttcttttctaactgctaatgcatagctattagaaaaaccatacataccagtccattgcattttaagtttagttttgtattccgactgtagtttactaaacatactttcagtatataattcatttttcttaagtaccatattccagcctgtacctgtatactctggataaatgtcaaattctccattctccatagctggctggatattagatgttccccctcctatgccttgtgtaatttccacgtttagacctgtgtttttttcaattaaaatatccaacatctcaccaagaatatattgttcagtcataggtttagtagcaatatgaatagtttgagtctttgaaggattaaataaataagacgtaaagatagttgctataagaataaggcttcctagaatggcaaaaacttttttcctatttttcttttttctttttcgttgaaaaaatttttctaccagccctaaaataaaatcaaatattaaagctaatagagcaataagtatacttccactaattgtcattgctgtgttatttgtcgtgattcctctatatatggctacacctaggcctccagcacctataaatgaagcgataccagctaatgcaattgtcataatcaccatatttctaataccagacataataacaggtagggctaatggaagttttattttatacaatatctgaaaatctgtactgcccattcccctagctgcttcaagaatatttttatccacattagtaattccagtatatgtatttctaaccattggcaataatgcataaatggtaagtgcaataacagcagtagtatttccaattccggaaaatggtatcagaaatcctagcatagaaatagatggaatggtgtatagaaaattgatagttcccaatataggtttagaagaattatgaaattcacttacaataataccaattataccacccaaaacaatcgcaattattatagaaataatagaaatcatcaaatgttctatggatagctttataaaaaaatcacttctttcagataataaggttagaatatcatttatcatccatctctctccttttataagttttacttaacaagatttaaattttaatgtagttaatctttattgtttatacatcagcaaatcgtcatcaaattatttcacaaattatatattaagattataatctgaacctcccatgactgaagtcacaagtgtgtatagccattttttaatcaaacttgcaagtagacacaaaaaagtaactattagagactccatcttcgatactctccataaaaataagaaaaaaggtcagaatcgttaaaatactaaaatttaaacaaatttctgacactttatttaattaaatttgaatatttctcacattatttattactgttaagtttaattatcattttatatacccattatatttattaaaatatcattataattttattatattttatttattatactatatattttgctgttaatgatattttattgttacataattgttttgggataccttcaaatattactctcccgccttttgtccctccttcaggtcccagctcaataatccaatcagctcttttaattacatctatattgtgttcaattattatgaccgtatttccattatctacaatctcttcaattatacttataaaattctcaatatcagccatatgaagacctgttgttggttcatctaatatatacactgaactttccttatttaattcactagcaagctttaatctttgacactctcctccagacaaagtatcaagagtttgtcctaaagtaaggtatccaatacccattttttcaatacattgtaatttcgttttaatctgttttaaattaaaaaactcaattgcgtctaaaacagacatttcaagaacttcaattatattcttcctttgaaacctatattctaaaacttcttttttaaattttttaccttcacaaacattgcaggtactctttatactctccataaaagcaagattcatttctactattccagaacccttacagttatcacaagctccttctgaatttgaactgaataaagaagcatttacgccatttgtttttgaaaatatgcttcttatgttgttcataattccactatatgttgccaaactcgaccttgaatttgctgaaacagggctttggtctataagtacagcactaggattttgctttaaaaattcatccttaatcaacgtacttttacctgctcctgctactccagtaactagagtcaatacacctttaggtatcttaatagatacattttttaaattgtttttattacaatttttaatttctaaatatccactatgttctcttacactttctttaataggaagaaatttacttaaagcattccctgtcaaagtaccacttgtaagtagatttttataactgccttcatacacaacttttccaccatacttacctgcctttggtcctacatctacaacatggtctgcaatcttaataacatctgggtcatgttcaacaactataattgtattccctttatcacgcaatttttttaaaagattatttaatttatacacatcttttggatgaagtcctacacttggttcatcaaaaatatacattaaatcaacaagattactatttaaatacttaaccatctttatacgctgagattcccctcctgatagagaagatgtctctctatccagtgttaaatatccaagacctatatctatgatactgtttaacttttctattattcctttaattaaaggttgtgcttctggctcatttatacttttaataacttcagccaattcatcaatttgcatactagttaaatctgctatattataaccattaattaaagacctatatactccttcattaagtcttcttccatcacatataggacatctatcttctataagaagtttactcaattttttcttagtagcctcagatatttctccatctctacttaagtatagacgattaaatttaaccattaatccctcatatgtcatgttagtttgaccagcattttctatcttaatcttttctgctttaccatgcaaaaacttttccaattctacttctgaataatcacatatcctcttattaatatcaaaaaatcctgattcagcgaatatattccaatgccaagaacccactccaaaccctgaaagcaatatagcaccttcatttaatgatttattcatatcaagaatttggttcatattaggaactagcttttttccaagcccatgacagtgtgggcacataccatcaatatcattaaaagaaaacatattagcattacctatatactcactaccaaaccttgaatataaagctcttaaaaaggaatttacatctgtaatagtacctagggttgaccttgaatttccaccaagtctactttggtctatgataattggtgttgacagattttctatacaatcagctttaacctctccatacttaggtaaaaaacttcttacaaatgtactaaacctttcatttagttggcgttgtgattcttttgcaattgtctcaaatacaatagatgactttccagaacccgacacccctgtgaatatggttatttttctttttggtatttttaaggaaatattgttcaaattattctctttgcaaccttttaaaattataaattcattgctcatattttacctcctgcattatttttctttaaattatttagagaaaatcgtaataatagttgttagttatacataagtgaaatactattttattagattactcctttttttataaacacaggtcaaattatagcatgtagattttatctggtagtatagtgtagggtttgatttttataaaaaatacagttattttatttaagcgtaattgcatctattctacctaaatatcatcattatatatgagtgttaaattatataaaattcttaagttaataacctcaaaatggtattagttacataaaaaaagtatcttgcctatgattttaaaaccataaataagatactatgttttacactgtttcttctttcacaaataattctatacaattattcaacttaactttaaaattttaaacattaaaaacctctatctttaaatctttaaataaaactaaatttccaataccttcaaaactatagaaaattccaatcaacttatcaaacataacttactacttataagaaattaatcttcacttaatacagacgtaagttcagggtcatttagaagatgttcaaaataactatgtgccgaaatatatcctataccatacattttacgctttgaatttacaaccttatattcataacaagcactcttaaccttattgtagtcatcaaaatccattgctttatagatagctctttcatttcttggtatatactttacatattttggcttaacaaaatacaagtcatcttttatcttaccttcacgtttaagtttctttaaaacttccccattctttctatgcattatatggtcatcatacttatagtgatgggctatatgggtcacattgcctttaaacttatgttcaaaatccaatatagtcttttccattaattcataatgtgtgccttcctttttatctatatctgcaagtataatcacattttgaggtttcactccaagctctctcaaagctgatttaaactcattatttctaagctcttccttttgcttcctagttaagtttctaaattttgtgttagctttgaaaacgttaactccagaaccatctgatactaataccacatatacattatcaacaccacactgttttatagcatctacaatggcacttcctccccataaaacctcatcatcttgatgttgaggataaaacactgctgctgatttaaattttctactattactctcaggaataggtatttcaagttttccgttaaaattctttgcaattaaaaatatcatcaataatattaatatacttattcctatgtacttcgttttactttccatatttaaaattttctccttcttctgaacctcccatgattaaagtcacagggttactacttcatagaatttcgtataatcaactcaaatatcttataaacctttgtgtcaatcaggtctaaatatacaaattattttacaatattttattgtttcatacaatctttgacacgaactataataaaataaaaaagccttctaactgcaacattgcaaatattacagccagaaagcttcttaattcttaaaatttattaagcttaaaaatttattaaatttattttttaatataaatatgtctattattaataaattatactttaattactatatcaatacgactttactatatcactataacattacttatatcaatacaactatttttatagcctacatttcctttaaaatttcaagcaactcttcttcactatacatatacttcttattacagaactggcaaccaacttctgcttttttatcttcttctattatctgagccaatgattttttaccaattgcaaccaaagcagtttttactctttcttttgaacattcacacataaaccctacttcacaggtatcaagtattttaggttccaaaccatccaaaacaatatttaatatatcatctggtgattttccttcttttaacatgttagttatagaaggtaatttagctacattttcctctaacttagcaatagtctcttcttctgcatctggcattaattgaactataaatcctccagcaaactctacttcatcttcttttgtaagaacacctaaagctactactgatggagtctgctctgatacagcaaaataataagtaaagtcttctgcaatttctccacttaccaatggataagtcccattatatggttctctaagacctaagtcttttataacttttacaacaccttctgtacctactgctgctgctacatttaactttccatttggatagtcttcaacctctacttgtggatttcctacatatccttttaccattcccttagaatctgatgtggcgataatagttccaattggacctccaccttttattattacagtcaatttatcactatcatttttcatcattaatcccattatagatgtggctgttaatgttcttccaagtgctgctgttgctacttttgtagtttcatgtaatcttctagcttcttctactgtatttctagtagttgcgacaaatgctctaacttgaccatttcctgatgtcgctcttagtacataatctctcattaatattcctccatgtcccgttaattgtcttatttttattatattactaccttaattttaatctataagtacttatctatattaaccttgggcaaaacccattttattttaattttactaagcaatagttattatattttaatttttatctatagaactttataattattagaaaataaaagtcataaagtatcatcactttacttttaatctataaaactgcattttctatatttttatatcatggttatttttaataattatcttatatagtcaaaaatatcttattttttacatacaaagaagattctttgactttcttcactgggtttgtcaaatgtaaaatccccataatattttatatccttaaatccagatttttcaagcatatcaactatctcatcttcagtatatgctctttgttggtgtatctcttcaaatctttcaaactttccacattcatctttaataaagaatgtaagttccatttcaattagattctcttcttcatcaaagtaattttgccacatatacgctatatcttctctattttctccatacatgttatttcccaatatgttggctaatttataaaaagaacttatatcaaatatgaatattccatctttctttaataattcatatgtctttgaaaatacattttccaaatcatcatcataagttatataattaaatccatcacaagcacaaagcacacagtccaaatcagatatttcaaaatcaagctctgatatatcttgttgaagtaaaactaattctactccttctttttctgccttttctcttgctacactaagcatctcatcagatatatctataccagctatatcgtaattttttttagtcaatggaattgtaagattacccgtgccacatgccaattccaatatattttttacttttacaccttcactatctattatatcttctatatatttaacccaaccattataatcaacttcattcataagttcatcatatacaaacgcaaaatcactatattgactcatcctttttattctgctcctccacaatctttttaagcctctttttgcgtgatgtaagcatacctccaattcttcctgcttccttagctgtaagtcctgcccatccacgttcaccaactttatccataagacctagttctgaggctatctcatatttcattatatcatcatttgtcaatattttagtattcttgccattagttatcttcttttctctttgtactttttctttcaaaaaaatcaccccttcttatttgtatttttgtcaattaaaataaatttatacaaatatataaggggtatttattaatacattttttttaaatttaggtatttatgctttttaatctttataatttatcttcctaatctattgcttctttgtattttaataattttgaataaacattcaatgcatttacacatatcttttcatcaaaattaaagtttatattatgaagaccatttacaaatcctttttcttcgtttcttgaacccaacataaaaaataatcctggaacttctttttgataataagaaaaatcttctgatatcataagtggctctaactctacaacagtatcacttccaatagcctctacaaactcttgatacaaatccttgtcatttttaacagcaatataatcatctataatatttatattaaccttacagttataagccaattcaaaccctctagcaagttctctaactctaagcttcattttctcatacacttctgggctgaaacatctcatagtaccttccatctttatattttcagctattatatttcttctagctcccccttcaattctaccaatagtcaacactgcattgtctattgggcttatatttctagacactatagtttgaagtgagcttacaaagtttgaagctatcactataccatcaataccattttgtggcatagccccatgtccacttttagacactatttctatgtcgatatctcctatttgagccataaaatagccttctcttgtacctacataaccttctggtaactctggatatatatgaagcccatatatttcatcaatattgtattttctaagcactccttcatctattaaagcttttgctcccccaggaccttcttctgctggttggaatataaatactatattatcatttaagtcttctttattatcatttaaatactcaattaatccaagtaatatagtagcatgtccatcatgaccacataaatgttttaccccttcttcactatgaagaccatctatgtcagctctaaaagcaatatcttttttaggtcttttaccttctattacacctactatacctgtttctaaataaacttcatactcaattcctaatttatcaagataatctcttatatattttgaagtcttatactcttttctcccaatctctgcaataggatttaatgacttcctatgtttataaagttgttcttgtaaatatgatgcctctctcatgtaatctcctccaatttctaatttattaaaaaatatttctatatttctttataattaaaatattatatagcatgttatactaattaaaaataaaaagctaaattgaatataaaaatattttgcattattaaataattcaccattaataataattcccctgtttcataaatcaaaacagaggaattattattggaaaattttatttttagcaagagaagaaatgtttagcaagtccacccttagctgtttctttgtacttatccatcatatctataccagtttctttcattgtttcaacaacttggtctaaggagacagaatgtgagccatcagttaataatgcataattagctgcatcataagctctttgagctgccattgcatttctttctatacatggaatttgaacatatccatatacagggtcacaagtcattcctaaatgatgttcaagtgctatttctgccgcatattcaatatggtctatagttccaccttttaagtatgctactgctgctgctgccatagaacaagctgctccaacttcaccttgacaccctacctctgctccagatattgaagcattagtttttattatattacctattattccagctacaagtagtgcttcaattattttttcgtcatcataattatagaaatcctgcattgcaaagaatattcctggtattactccagcagaaccacaagttggtgctgtaactattatattaccagaagcgttttgctctgaagctgctagtgcatatgcatatacaagtgttgagaagctcttatcttttttatatgcattataaaatgtacttgctcttctttttaataataacttgcctggtattatttcatctgtacttagtccatcatcaatagattttctcatagcatcttttatagtttttatataatcttttatgtcttttggttcacattccaacacaaaatctaccaaagtcttattattttctttgcaccattttactatctcatccatagtatctaagtgatatatactattgcttttactgtttctttgaccttcttctgctatagtccctccacctacagaatatacagtccattcagctgttacatttttatctttatctaaagcttcaaacttcatcccatttgggtgaaaatcttttataatatcttcttcccaaacaatttcgacttttttaggtgctatagttttttcaattatatagtcagttaagtgacctttccctgtagctgccaaactaccatataatattgctctaaaactttctgcatctgggttttcattcttaaatctctctgctgctctttgtggtcccatagtatgagaacttgaaggtccacttcctattttaaaaagttcctttaaagtatccatattattcctcctaaatttacggtattattgcttattgttagattttacgcacatatttattataacctaaatatattaattattagttattaaattctcataaaatttattttttatttccattttggtatattttattaaattaatatgcatattttgagaataaaacatttatttaaaatttttctaatattaatataatataaatatcttatttaaacagttaagatattaactatacctattaaaattaattaatttgtactataattattattgtacttaaaaaattaaatttagataaaaaaggagatttgattatatgttatttaaaggttctgctgttgctttagttaccccatttacagaggataataatgtcaactttgaaaaattaggtgaattaatcgaatatcacattgagaatggcacagatgcactagttgtttgtggaacaacaggtgaggcgactactatgagtgaatctgaaatttttgctgtaataaaatatacagttgaaaaagttaataagagaatacctgttatagcaggtactggttcaaacaatactatgttgtctgttcatatgagtcaagaagctgaaaaattaggggtggatggtcttttaataataactccttactataataagactaatgagaaaggtcttaaacttcactttgaaacaatagcaaatagcgttaagttgccaattattttatacaacgtaccaggaagaactaaagtgaatataaagccatctgttgtggccgaacttgctaaaatagataatatagttgctgtgaaggaagcaagtggagacttagctcaagttgcagaaatagctaaattagtacctaaagactttgctatatactccggtaatgatgatactatactaccactattatcattaggtggaagtggtgttatctctgtacttgctaacatatgtcctaaagaaacacatgatttagtaactaaattctttgaaggtgatattgaaggctcaaaaaaattacaacttgatatggatgctttaattgctgctttatttatagaagtaaatccagttcctgttaaaactgccatgaacattttaggttttaatgttggtgatttaagacttcctctagctgaaatggaagaaactaatcttaatgtgttaaaacaagaattgacaaattttggatttaagttttagcaatatttatataaataagttgattttttcttaaatatgtattattattagaataatcaaattttaatatcctattaacctagggtagaggtagctgtaactaagagtatccaatagtagctggcaggtgttaatgattggaaaaaggatttacagccgaagaaaatatttcttgcaataatattttctgggattgcacataacatgtgtaatactgtcacttatttttgtaggtgatgagctacagggtttactttgagtgataaattagacgtacaaagtatacctttgtacgttttttgtatataattaaagttgttaatataatattaaagtttttggatatataaaaatattaacatatcttacttgtataactaaaataaaataatgttttaataatttaaaattggggtgaatttatatgaaaaaagtaaatgtagcaatagttggtgctactggaatggtaggtagaacatttttaaaagtattagaagaaagaaattttccaatagaaaatctatttttattctcttcttctaaatcagctggttctaaagtaatgttttgtggtaaagaatatatagtagaagaattaaaggaaacttcatttactgatagaggcatacaaatagcattattctctgctggtggaagtattagtgaaaagtatgctccaatagctgcttcaaatggaatcttagtagtagataactctagtcaatggagaatgaatccagatgtgcctttagtagttcctgaggttaatccagaagccataaaaaatcataagggtataatagctaatcctaactgctctactatacaagctatggttccccttaaagctcttgatgataaatacaaaattaagagagttgtttactctacttaccaagctgtatctggttctggtgttaaaggtgttgaagatttagagaaaggaatgaacggtaatcctactggattctaccctcatcaaatctcttacaactgtcttcctcatatagattcattcactgaaaatggatacactaaagaagaaatgaaaatggtaaatgaaactatgaaaatacttgataactatgatttaaaaataactgcaactactgtaagagttccagtaaaaaatggtcatagtgaatctataaatgttgagtttaacaatccatttgagttagatgatttagtaaaaacacttgaagaagctccaggtgttgtagtagttgataatcctgctaaaaacgaatatccaactgctgtagaatttgatgatagagatgaagtatttgttggaagaataagaagagattttagtgttgataatggtgtaaatctttgggttgttgctgacaatataagaaaaggtgctgcaactaacgcaattcaaatagctgaaatggctttatcatacgatttagtataatatacaaacttgtataaatatataattttgtaaaatattaatagtaactcaaaaacaagcattagaagtaactgtaatataaaacacaaaaataaaaaagaggggattgattttatatgatatttaaaggttctgctgttgctctagttacaccatttacaaaggataacaaagttgattttgacaaattaggtgaattagttgaataccaaatagctaatggtactgatgctatagtatcttgtggtactactggtgaagctaatactatgactgatgaagaacaacttgctactattaagtatgttgttgaaaaagttaataaaagagttcctgttatagctggaagtggttctaatgatactatgcactcagttaacttaagtcaagaagctgaaaaattaggagtagatgctctattaataataacaccttattacaataaagctaataaagctggacttaagcgtcattttgaaacaatagctaacagtgttaaacttccaattatactttacaatgtccctggaagaacttgtgtaaatataagtcctagccttatagttgaacttgctaaaattgataacatagttgctgtaaaagaagctagtggagacctaggacaagttgcagaaatagctagtttagttccagatgactttgctatctactctggtaatgatgatactatacttcctttattatctttaggaggtcaaggagttatatcagtacttgctaatgtttgccctcaagaaactcacgatttggtagctaaattctttgaaggcgatattgaaggttctagaaaattacaacttggtatggatgctctaatcgcagctttatttatagaagtaaatcctataccagttaagactgcaatgaatttattgggattcaatgttggagatttaagattacctctagcagaaatggacccagcaaatttagaagtgttaaagaaagaattagttaactttggactaaaagttaatgcatagtaaagattaatgcatggtaaaaagtaagtttggtcaaaagttagcccttaatcataggaggaaattatgttaaaagttatagcaactggttatgatggaaaaatgggtaagattttagccgatactataagagaagataatgaattagaattggtttgtgttgcagctagaggtctggatagctatgaaggcgaccttaaaatttatgaagatatgagtactatagttgaggaagctgatgtagttatagatttttctcatcactctaatttagataatatcttatcttacgttttaaagactaaaacacctttagtaattgctactactggatataatgataacgaaatgaacaaaatacgtgaagcggctaaagttattcctgtattccaatcatataatatgtctcttggtgtaaatgtattagtaaaattggttaaagatgcagctaaattactagaaggatttgatatagaaataatagaaaaacatcacaacagaaaagtagatgccccaagtggcacagctgttatgattgctaacgctataaaagaggttttgccaaacgttgaaaataattatggtagatatggtcgtagtgcaaaaagacaaccaaatgaagttggtattcatgctataagaggtggaaatattgttggcgaacatgatgctctatttgctggagacaatgaggttcttacaataagccatcaagctcaatctcgtggtatctttgcaagtggttctatagctgctgccaaatacttagttaagcaaaaaccaggattttataatatggacagcatgttgggataatagtataaatataataatacacaatataaattaaacatatgcaatatagatataataatacgcaatacaaatcaaacatatataataaatttatttaatactatgtctatacaataaaaactaactaaaataaaatataaataataagaagtaagtatatactaaaattgacaaataagtatataataaaagaaatataatgaaatacaaggagaattaacaaatggtaaatttaaacgatgcttatgaaatagcaaggtatataaaagaagttaaaaagaaaacacctgttaaggtatatgtaaatactaactctttacacttccaatcaactgataaatttaaggtatttggaagtaatggttcttatatatttgtaggtgactatgaggatataatggaagtattagataaacatgggaatgatataacagatactcatgtagaatatgatagaagaaattctgctattcctctaaaaaatactttaaatgaacatgcaagaattgagccaggtgcaataataagagacatggttactatagaaaaaaatgctgttgtaatgatgggagctgttataaatataggagctgttattggtgaaggttctatggtagatatgaatgctgttattggagctagaggaactcttggtaaaaatgttcacttaggtgctggtgctgttgttgctggtgttttagagccaccttctgctactcctgttatagttgaagatgatgttttaataggagctaatgcagttattcttgaaggtgttagaatcggtaaaggtgctgttgttgcagctggtgctgttgtaactactgatgtagaagctggtgccgttgttgctggttctcctgctaaagttataaaaatgaaagatgaaaaaacggctgacaaaactaagcttatggaagaccttagaaatttagactaattaaatagtactatattattaattagaaagattaattaaacaataatatactaatttaaaaaattaattaaaaaggtgtctctgtatgaatttaattcatcagaggcaccctcttttttataatatttttatcttttatttataatcattttatttttttacaattctcttattcattcttatatcatttttatttcttgatgacaagtatttttatttccttcaatttttcaatatatcaatgtaataaactattaaactttttataatttaataaatagaactgctgtttactactggttgtgcatctttattgccacaaagcacaactaacagattacttaccatagctgctttacgttcttcgtccaaagtcacaacattattttcacttaaattagtcaatgccatctctaccatacttacagccccctcaacaatctttttacgtgctgctattatagcctctgcttgttgacgttgtaacattgctgctgcaatctctggtgcataagaaagatgagtaattctcacttcacacacttcaattcctgcaatgtcaacccttgattgtaattcatcttttaatctatctgctatttcctgactactaccacgaagagatttttcatctccatcttcagatacatcatatggataaagtcttgaaacattacgaatagtagaatcacactgaatagataagaatgtattataattatccacattaaatactgcctttgttgcatttataaccttccaaattacaaccactcctattataattggatttcccaataaatcattgactttctgcttttcattattaagagtcattgtttttaaagatacttttttgccccttgaattagttgatatatctaccttttcatcagatgaagatttcgatacattaattcttgatactgctgggtttattgctgaacaaaatggattcacccaatagtacccttctttttttatagttccataatagttaccaaacaaaactagaactatagcttctttaggattaatcatttttagcccaaaaaataggataaaatctactactataaatacaagtcccaaaattaacataagtgaacctattccagtaaatccactatcaagttttactatcccaaaaaccatgatacctattgaaactactaaaaataatacaatcattatcaaagctgccactccattgaatacttttgcgtctttctcttgataagttttttcttcttttaacatatctatcactcccatctcagtatattaagttaagatatttctaatttaataataacacttttaacaattaaattgttgaatttaaaattaatactatatgtttatatattttttatacatctttatgcatacatgtatttagttattttaatgtattaatattgatttccaaataaatcatatgatatatgaatatggtatctcaaaattaactttttagttcatggggcactctttttgatatgaagtcaaatatatttttatcatttatacaatgaaaaagaagtttatctatattttgaaaaatccacttaaatttttttaatgtaagataaattgtaagcttattatcactaatattattttatataaataatattagtgataaaataaacttatagaaatataacaaatttttattaatttcataggaggaatttatattgaaagttataattaatggctataatggaacaatgggaagagttttagcagaatgtgtaaaaaaagataatgaattagagttggtttgtggtgtagctaggtctgctgatgaaaaaggtcatcatagtgatacaaagctttacaaaacaatgactgatgtaactgaaaaaactgatgtcataatagacttttcacatcatgagactttagagccaatattgtcatatgctctaaaaaataatacacctgtagtattagctactactggatatgatgaaaatgacttaaataaaatagaagaagcatcaaaaaacattcctatattattatcatcaaatacatctcttggagtgaatatattaataaaattagttaaggatgcttcaaagatgttagaaggttttgatattgaaatcatagaaaaacatcacaatagaaaagaagacgcccctagtggaactgctactatgatagctaatgcaattagagaagtcttgcctgaaagtgaaaatacacatggtagatatggtagagattgtaaaagaaaaccaaatgaaattggaatacactctataagaggtggcaatataatcagcgaccatgatgtcatatttgcaggtgataatgaagttcttacattaagccatcattctcaatctgatgaagtatttgcaaacggttctatagttgcagctaaatttttaattggtaagcaatctggactttataaaatgtcagatatactaggataagttttgtacataataaatctcaatctatttaggtattcatattcatcaatttgaatatctaattgattgagatttctattctaaaagtttataaattttatgcttaccttttaaatataatcatttttcttaaagattatcttatttattggtatatggaattatattgtttattattttatagtcctttcatcatataaacctattaaatattatcctatttattggtatatgaaatcatattgtttattattttatagtcttttcatcatataaacctattaaatattatcctatttattggtatatgaaatcatattgtttattattttatagtcttttcatcatataaacctattaaatattatcctatttattggtatatgaaatcatattgtttattattttatagtcttttcatcatataaacctattaaatattatcctatttattggtatatgaaatcatattgtttattattttatagtcttttcatcatataaacctattaaatattatcctatttattggtatatgaaatcatattgtttattattttataatcttttcatcatataaactattgtattctataaactgatacatacccagctggagaagtacctgtcgtgcctgaaccaaatgtaaagcttaaagtaacagctgctgctctagcatcaactaaaaagcttaaacttacacttacatctgatgaagtaagcgtatttactgcttttgcaataaagttattttgggctactccattaaagttagtagtaattgacataaatcctgcaagtgaaagtatggcacgtataccgaaagatacattgtatatccctccaactgcaagatttatagtactacttgttggaaaagttatattagttccatttataaatgatgaattaaatgtcactaatgtattattccctaaacttgaagaagatactgtaaattgtgcattgtttgctgctaacactcctgttgctccggtcgctcctgttggacctgttgctccatttgctcccgttgctccggtcgcccctgttgctccggtcgttccatttgctcctgttggtcctgttggacctattggacctgctactccatttgctcccgttgctcctactgctcctgttgggcctgttgctccatttgcccctgttgctccggtcgctcctgttgctcctgctactccatttgctccggttggacctgttggacctattggacctgctactccattcgctccagttgctcctactgctcccgttgggcctgttgctccatttgcccctgttgctccggttgctccggttggacctactgctccatctgctcccgttgggcctgtcgctcctactgctccggttggacctattgccccagctactcctgttgctccggtcgctcctgttggacctaccaaaccatttgctccggttgctccggttgggcctgttggacctaccaaaccatttgctccggttgctccggttgggcctgttgggcctgttggacctaccaaaccatctggacctgttgctcctactgctccggttggacctgttgctcctattggacctgtggcacctgttactccatttgctcccgttgctcctatacttccggttggacctgttgctcctgtatttcctgttgggcctgtagcacctgttactccatttgctcccgttgctcctgttgctcctgttggacctgttatcccattcgctcccgttgccccagttgctccggttagtccggttgcaccatttgctcccgttgctcctgtatttcctgttggacctgttattccatttgctcccgttgctcctgttgctcctgttggacctgttatcccattcgctcccgttgctcccttgtttccggttggacctgttattccatttgctcccgttgctcctgttgctcctgttggacctgttattccatttgctccagtcgctcctgtatttcctgttggtcctgtagaacctgttgttccatttgctccagtcgctcccatatttcctgttggtcctgttattccattcgccccggttgctcccgtatttcctgttggtcctgttattccatttgctccggtcgctccggttgcgcctctaggccccgtcggtcctgttggaccagtagcacctgttggccctgttggacctacatcttgatataaacttggacctgaaatatcactcatataattaatcctccttttttaaagttagagtattactctataaatattgagtattactctatataattatatgaatcgacaatttcttatgtgataatgtatctatttgcttatatcaacatatatgctttgattcttaaatttcattacttttttgtaaaatcttttacaattattagtactcttttacaattattaatacaattaaaaaactcatttcccatcaattatttaaaatttttttattatgttataaaaaatagataattaaattgcataaaattaatttaatactactttaattactttttaaataaaaaaacctcaacacgattaataaaaatcatattaaggcatccacaaaattatataattgcttatctatcttcatcagtaacattgaatatataaggaacatttctataataatcaccaaaatcaaacccatatccaaccacaaacttatcttctatttcaaatccacaataatctggcactaaatcaacttttcttctgcttggtttatccaaaagaacacagcattttaaactagcaggatttttagcttttagatgttttaacacaaaatccatagtaagtgcagaatcagtaatatcgtctacaaccaaaacatcatatcctgctatatcagtagtcacatctgaaaccactttaacctttccagtactttcttcattgtttccataactagatgtagtcataaaattaactctaagtggtaaatttatatttctaactaagtctgcacaaaatataaagctaccttttaatagagaaactaccataagatttttatctttataatctttttctataattgctcctaattcccttaatttatctttaattttttcttctgaatacaatacttcccatttttttgtttctatatccataaaaagacctccaattgtaataatccttcttaattttataagagattgctcactttttcaatactcttattcaatattagtcaatattattgagtttttatgttcattcaacaattattaacaatgtatcttatattttaagtagttcatatatccacactaaattacatactatatattttagacaaaaaaagaaaaaacttgcactaacaagttttttctattatacataaatttatacataatcatattttattagagggtactaattaaatttatttatgctatttttgttatacctcataatacaaaacatattataaagtactagtcaactttattcatatcattcattacatttaagattatctcatctgttatagacatacctttgtcacttactctacctaagttttgtatactttgctcaacacttgaaccaactataccatttagtggtggtacaaaacaatcttgcttagctattatagcactttgtatagctgcagatgctgcagaagataattttaatgcacaaccagctttcgcaccgtcacatatcattccacttaagtcagctatcatattttctatagctccttctatttgcttttcagtaccattcataagccaagagataccagcagttgctccagtagaagcagcaacaccacatccacacacagcagataatcttcctgtatagttcttaatataaccagttactagatgagatatagctaaagcctttgctagtttttcatcagattgtgggaattttttattataagcaacgattggaagaattgctgttaatccatgatttccacttccatttgaactcataacaggcatttttacgcctgccattcttgcatctgaagctccagcagttaacatcattgcataatttataacatcattacctaaaagaccttcttctatagactttttaattccatatccgacaccaataccagttttttgttttaatccatattcagccatctcttcattcatttttactccatctagtaaaaattctatatctttaaaatcaatttcttctacattttttattaattcttgtatagttactgtatccattaaactttcagctttttctgccgcatcatttgaagctgatacttttggttcattgtctaataatacttctccatctttttctaagaacgtaaaattatcatgtttagttcttattctcactttagcaatatgattttttccttttaacacaacttctataaatactttctctcttgtatcagcaggtgttattgatagtggagtattatccatataatcctcagctattttaacttcttcttttgttagagtttctaacacacttaatccattttcagaatggccacctactatacctagagctgctgcaatttttaatcctaatctttcagtacctggtatacctacgcacatgccatttttgtagatactaggactaactaacatacgattttcaactatttcttctcctaataattcctttgcctttgcacatgctagagctaaggctactggttcagtacaccctactgctggtttaacttctgcctttaacatttccactaattcttttcttatatctctcattatatataaacctcccaattaagtttagatttagtactcaaataattaattaaataatttcttatctatatttatagcaaaatacatgccatattttttatatctttttatatttttagtcttatattctataaccattggtatgactgcttctatttatgtattttttttatttacatagagtatttatattctttaaaatggagaaacatatgacaatttcgcaaaaagacaaaaaaaagtctcagaatgagattctatatcattttgagacggctcaaatgtgttattttttaacttataaaaaccattttttaattcataaaaaaagattatgcaaaacacttatagtataagtttaaagctttctttaaagttatgaatttagaaaaatttaaattttatatagctttttattatattactatgaaattatattgtatttttcaatttttctatataatgtagctcttgatattccaagtgctttagctgttaattctttatcttttttataatctttgtacttatttaaagcttttattatctcaatcttctctagttcatcaagtggaattatcctatcgcttttaacttctaactcttctacagaggtattcttaattttttgaggaattacattcattgtgattattgaagaagaagacatattcacactatattcaataatattctgcaactctcttatattccctggccacttatattccatcatagcatcaacaaccctgctatctatgtcaataacatttttatctaatttttttgaatactctttaaccatatgcttgattataagtgggatatcttcttttctctctcttaaacttggtaattttataggtataacatttaatctataatataaatcttctctaaaagtgccattttgaaccattttttctaaatctttatttgtagcagcaataattcttacatctattgagacatttgatttacttccaattttattaagttccttttcttgtaatactctcaataactttgactgtaaatgcaaactcatatctcctatttcatctaaaaatatacttcccttatgagctacttcaaacattccaagctttccaccttttttagctccagtaaaagctccctcttcatatccaaataattcactctctaataaattgtctggtatagcagcacagtttacagctataaaaggattatctactctattgctatggttgtgtatggctcttgcaaatagctccttacccgttccactttccccagtaataagtactgttgatgttgatttagaagctattagggcttcctttttagaatttcttatagctacactttctccaattatgttttccaattttattctataatctttattcatcttattgtagttttttatagcatctcttttatctataaaatcaataacatatccctttaactcattttttaatactattttattgatgttgtatattcccttcgaatcatatccgtatcttttataaaaaaaactacacgatttgtctttcttaaagttatttatagaaggtttctttataaaatctaattcgacaaatatgtttttgccagttatactatcctttatattgaaaagctctttaaattttgaattatatttatcaatttttccatccacatcaatagacacaacagctttgtccatattgtttaatagtgtctctaattttttcttttctaattcaagctcataagttttaatttgtgcttttaatttattagatattaagtctgccattttgcctaaaaagtttataagaccacttttattattttctataatttgtgcttgttcttttgtaaaggctataaggcctataacgccatgagaatcgccatcacatataataggacaacacacctctgcaaactctacacaagccccacttttatagcattccctacatacatcactactctttgggtcatcaattagtattgtgatctgttctgtaagtgattttttaaaagccgtatatttatctactttctcacctattttgtctatatatactcctgtacctgcaatcctaaataactccttatttactatagttacatctatattgagtactgatactatagcttcagctatattttgaatatcagattttatatattctaaacctatcataaccatcattccttatttttctttaacataagtatttgtcttatttctttaagaatcaagtatatcttatttaaagtaaattggattgacatcaggattacaaagagcataacaattattattaactcataatttatttccatctaaacatctccttataacaaaagactaggcttaacctagtcttttatattatatccatatttatattttaactcatttatcttctttttcccacataaatatattttaatttatttgactctttaatcataccatcaaagtttaatcttgaaaatatattaaatacttcatgtggatagtgaatctttgcaacagaaccacaaaatttatgtttaagataatttaacttaacttttaaattctttaaatttaaatcctctaatataacctctccattgccctttaacactctttgtatttcagatgaagctttttcacaatctgtaataacattaaattggtcaactattattatcttgttgaactgattatcatcaaatggtagaaactctaacttacctttaactacattgcaattttcattatacactagagaataacagacatcttcataattactattctccagtatagttacagaagttccaagacctctcaatctcttgcctaggtttcctatatgaccaacaagcaatattttatcacctacattatactcaattgtatccaaaaaacattctaattcatcagatgtatatttagctttaactggctgtttatttatctgacataatatgcttttcacaatgcttcacctcttcatttcctcaattataaattatgtacagattacattataataaatggcgagcaactattcaagagatatttcattagtatttttttaaacaatctttatacattttaatatgatattataccaaatttattaggattttattcataaaaatcagtctattttttatgtttattcattgttattttcatccaatttttttattttcgatatggatacttcatatgccatttttttgaccacattattttcatctatttttttctcatattctctactttgaaccctaccccaaagctgtattctatcaccaacctttagattctttgcaaatttagcatttctaccccaaactattgatggtatataatcagatttattataaggtctgtttatagcaactaataaatcggttatttcccttcctaaaggtgtcttcctatacacaggttccttacatacatatccatctaaaaatatactattagggtctttattttcctcgtctatgctttttatttctctgacaaacactgtaagcactaatctatttttattatttaatgttttgttatatgatcttaattggcctacgacattgactaaattttgtttatcaaggtcaatatcttggagaagtctttctgatacagtcattggaagtatatcaaaagaatcgcttagtctgtttatttttattttcatattataaaatttttctccaaatatctcatggctaaattctagcttattgtctaactcccctcttaagtttactacgttattctcatctttaacagctatcatattttatccctccacaattgttaattcttatatttctggtatcagcttatataataaatatatttataagggatgtattttattacaaatctttgattgctgtttaaaagtttttatttagttataaatttcatttaatatttcacttttataattataaaattattatctttttgtactacatatactaattaaactacctatttcagttttgtattaattataaaaatcctattatataattaataagtcatatataacttaaatttattcactctatataagcaacttcaacgaattaaatttattcaaataattcagatgaatattgagtcattataaacttatttttcttaattataagttatattagacttattacagcttatatttttattaatctgtattaatatatgaacatttattgaacttattgattataaaatttaaatatttagctttaaattatgctttattctttgaaaatacaacgttttttacattaaatctactaaatcactatatatattacataattggcatgttaattgctttatattaatttagcaaataaaaaactgccctaaaatattaattcaatattttaaagcagtttataatctttattattagctgtaatatttaataaacactaagtagtctttaactaagcagtctttttgtttttatttgcagccattatcattgtagcagaagtataagctataactactattactaatgcttttaatatatccattggtagagtttttactatatatgcagctacgaaaactcctattaaaccacatatagctattataactgatgcttttttagtatatgcatcttcttttataaatttcatacttgcaactggcattaataatgcacaagaacccataactattgggaatgcaacttttgcagacattcctaagaaataaaccattgccatacctggagcatatagacctataccagctgtcattaaagctcctagtataaagttacctattacacctattaccaatttaacaccagtaagacctaattcatttcctccacctggtaatacgttaatccaaggatgacctaataacattaatattgctgttaatgctaaagttacacccataacaagttgtatttttctctcgtccatcttagctattattcctgcacctatatatgaaccaactgctgctgccacaaccatagatactaaagtaacaccatcaactggtatgattgatgtaaatatgaatgcttctgtaacaactggaatagtatgtgctacgtttaatgtaccaggcatttttttatctggtatatttaactttaaagcctttgacattgctattgttggagcaaatgaccctattcctaatgtatcaaagaagtctgttataaatcctgttacagcaacttttggagtactttgttcttctagtttcccctctttgtttgctttagctacgtctttaccaaacacaactgcaaagattgctgcgaatactacatataatgcctttaagattgctaccataatccatcctcctatttttttattttttcatatattctgaatcttatagcctaaaagctatagaatagcaaccgacaagtggctactattctattttaatttcctaatttatttattacttatttaagaataaatccatgtttaagtgggtcttcttcatctattacaaaatgattaaatccagttatataagcagaaccagttattttaggtactacagcattgaaatctgcaactttagtttcttcaactatttcacctttgaataaagttcctaatatactttcatatacgaatttttctcctacttttaattcacctttagcatgtaaagtagctaatttagcacttgttccagttccacatggagatctgtcaacttgaccttgaccaaatataactacatttttgtaagtagcttctggatgagttggctcatcatatatttcaactaagtctacagtttttatatgagctaaagttggatgttgtatttctattttctcatttattatatctctaagtttcatagctagttcagttaatttaccagcattttgaggttcgatttttaaacctaattgacttgcatgtattatagcaaagaagcttccaccaaatgatatgtcaaatttaacagtcccaacacctggtaagtcaacttcaacaccttctttatataagaaagctggtacgtttaagaatgatacttctttagcttttccatctacaactgtaacgtctcctcttattattcctgctggagcttccataactacatgagttacaggctctactgctggaactacacctgtttctatagctgctgtcatagctcctattgtaccatggccacacatgttaaggtatccaccaccatccatgaagattattccaaagtcagcatctgggcaacaaggttgagtcattacagaaccaaacatatcattatgtcctcttggctctaacattatagcagttcttaaataatctagattttcctctaaatattcttttttctcaggcatagaatttccttttatgttaggtattccacctacaactattctagttgcttcacctgctgtatgagagtctatagcttgtatacttctgctaaatttcatatcaaattcccccttaggtttattttgcgtctttacgcatttttaattttaggaaagccaatgcttttttaacatcaacttcatccatgtgattgtctccaactacttctgtttctatgtagcctgttgtctttttataatcaattatggtagctttatccaaatatggattggtaattactaatccatctgctcccataatagtaagacctactgcaggtatatctgattttacaaactctgctatagcatttgtaaaatcaatgtgctggtttcctgccatatctaaagttataatcactccatcaggtcgcaatgattcaatccatcttccaagtctagttgctaaaaatgttttccattcattgtgctctgatgtcccaactacaaccactcctaacaagtctatgtcagaatcattatctatcaaatctagtaacgggtctctaaatatatgaagtgatgtgtttttcattgatgtagaaattcccacaaaactcattcccttacttaaattttttatccatgttttctcattttaagttttaaaaatgctaaagcttttttagcatctatttcatttgtgttgttttctccaactacttctgtctcaataccttcctttgatttgttcatatcaactatggtatccatatattgattgcttacaacaaacttagcttgagtcccattaaatgtaactccaactacaggtatatctctttttcctatttcctcaaatgtgttagcgtagtcaacatgtgagtttccccaaccatctgatgaaactatagctccatctactctcatggcttccagccaagcggccgttctttgtcccacaaaggttttattttcatttccatctggagttcctactactattactccaagtaaatctacatccttatcactttcaactatgtctaaaagtgggtctctaaagtgatgaagagatgtttcttttgttgaaggtcctattcccataatatccacctctcttaagtcatagctctaagggcaccatctctgtattcattaggagatataatcataggtacatttcccatatctataattgatgttcctccttcaaatccactaggttcctttgagaataactgattgtcatacatagcaccttgacctgctatttgttttactatgacaaccttttttgcatttggtcgaattttgtcaaaatattcacgaacttgagtagcatttcttccgtcttccattttcaaagacgctcttatttcttgtataaaatcatcacatgctctgaatgctgcaagtggaagtgttctttcaaaaggtaaacctccctttaaagttacatctacatggattatataatcttcaactgatggagttccatatctcccaaataccatttggtctttcaaaattccttctgaagaaccaaattcatgcatttgatttccatcttcatctgcaccagttaacattacatatacacccgttaaagtatgtgtgataccctctcccagtctgcctaaaacttttgttgatattggtataatgtccataatagtattaatttctctatcataatctccaggttttataatgtctacttttatgtctgttattaactcttctctttcttttatttcatctatacttgataaatctattgtaagtacatctttctttatagaagtttttgaaccgaaattaacttcattcatatgaaacggttttataacaagtcttctcattattttttcttccataatatccacctttgttcttaaaacccctctcctaaccgtgtaggagaagggttctatattttcaaatataaattacattttaaacgtgagctttatattcgtatggtaatggaactatcttaccagcagatggtattgcaactaattgctctaatgtatctcttaatatatgtgtttgcatttctatattatgtggttcaccagcattagcacccattggaactaatggagcaactgctctaggagttccgttttgtctaactactggaggaagagctgctattattattgtaggtattccagcttcctctattgctctctgcacgatcacggcagttctatggcaagtacctcagccagctgtcataactacaccgtctactccctcttccttaagtttagcagcgatagcaggaccagtttcttcagtgaagacatgttggtttcctccaccacccatgaatgcatagtgcataggagctactcctttgataaatccttctgcagctaattcatgtaatctatctatagggaacatacagtttatatctttgtttacatctccattgtcatatccaccatgtgataccatcatttcatcaactgtagctgtattaggtatagctctaaatgtagtatctcctgctagattaaatctcttgtcagattttaaatgaacaccagctgctgtagctaaagctatagtcatatcttttaattctttagttacaggagtccaaactggaggaggtgttattggaacgaatatttcagattgaagtccttgtactgttgtaaggctcatatatttcctctcccttctattttcaaacgattatttattatttttcttcttgttttgattgcatttctgcttgtttttctttttctctcctaatattttctacatactcttgattaggctctggacttaatacctcaggatagcttagcatgaatccaacttcttgacctatcttaagttcgtagtcagttataagcattctattaggtattttaaattgtccaagtctaccttttaggtctatagtcactccaccacctttgatgtcaactataataccttcataaaaagtctctgatgagatatattttaacctatccattataattctacctctctatactgttttaaacttggatctaaatttatgttattgtctaaatcttagttagtatctaaattttagttttcgtctttttcgtatatttctcttctcttcttactcattggtagagattgctcattctcttctaatactattttttctcctgtaactttttctatagcttctatgttatttaatttaacatttggattccattttctttcaggagctttaacttctacaccttctatagcatttttaagcatagccattattctaacagcatcttctggagctaaagtgttgttagataatatttcattctctataccttgcttagacttattgttgtctaccatgtgagtcatgtatttattaccaacaactagagcaccttgaacagctgagaaacttacaccaactactggtatacctctcatacctatttgctctatgtgagatgcgaaatctatatggttgtttccgaaaccttcagtagttactacagctccatcaacttccatagcttcaactaacatacctaatctcttagatacatagaatttctcagcatttacttgtggagaaccaacaaatacaacacctactaaatctatttcttcgtcttccatagctcttattactaatggctctctccagtaatgtcttgacatttcttttgatgcaggtcctatacaagttaatgcatggataccaccatctaatacttcaagtggagataatacaactggcatgtttcctaagtcaacgtttggttgagctcctaatgtaccaactggctcaactggtaatattaggttatcatgcattgcaccttgtcccattatttcttttataacaacaactttctttttaccttctcttctgtattgctctattacttcttcatcaactactaaagagttgtcaactttctttaatgcttctcttatttcttgagttacatagtcaaatgcacggtgagcagctaaaggtcctggtctttccatgttagttcctgcttttattgttacttgacctttgatgaatatttcacctttgtcagcagcacctggtctaccccacattatagtagtatttaactcaccttctgaagaaccaaattcacctatttgaactccatcttcatctgtaccagttaataccattacagctccatctataactctagttatacctgaacctaattcgccttcttctttagtagcgattggttgtatatctaatacagcttcactgtaagtttcatatttatcaggagttattatttctaacttcatatctacaactaactcttgagtttcattagcttctttacatatttcttctgcgtttctgatgtataaagtagttccttctattttagtttcatcagcaaattcaactttatctattttaaagtgttttttagttaagcttcttaaaagtttcttttcttcaacttttggagctacttctgctgctgcacttgccactggagcagcaacgtttgctactggagcagcaactcctgcttgaccagctactgataaaggtatctctaagcttatgttcttaccttcacctatgtgtattttaactgtttcacctgcaactcctgtgcttactggaactactgctgcttctgatactggagctgcttcttctactgtttcttctactacttcttctttagcctctcctgctttgtatccttctacgttatctgtagtcattggagaaagtgcatctaaagtttcttttaacttagctcctagtacttgacctatagttaatccattttctggtattgttaataatccagaatcctctaagtctgcaaatattgctggatcttctaagttttctggcgctataattgttcccgcttcaaatctacaacaacaaactgctgggtcatttgcatgggcttgagctgtttctaaagttattgacatagtataaaatacctccttacattattttcttatttattattttaaatctcaattcctcaacaggtaaccccttaactgagaaattaagtaaattaaaacctacataatttgttatgattaatattatttttttctcactcaaagtcactttatattataagcaattcctatgccaacttattaacaaaaagattttttctataatagattcttcatctatcgctatttttagccaaatattatataaatatttatttaaaatatgttattttttgtatttgtaaacattttctcaaacaaaaaaagtgtcaattaatcaacactttttcattttttttaacacatctatatacacaacacttatacaagtgttggctttactaggttttaaattaaagtttatcattttgtcaaaatttagtcatatgtcatattttagacacatctattttgtattggtctatcttataatacaaagttgttctgggtatatttaatatcttagctgctttagctttatttccattagacattttaagtgccttggttatattctttatttcaattttttgagttgccttcgttaaatctaagggatactcttcttcttcagtactattatttgtagaatccatcatataacttggtacatcatctacatctattttagaattttgtgacaatacaacaatattttcaatcgtattttttaattctctaatattacctttccatctataattctgaaatatatctattacatctttgctaattgtaagaacaggcttattattttgtttacatatctcctctaaaaagctatgaaccaataatcctatgtcttcttttctctctctaagtggaggaatctttatttcaacaacatttaatctatagtataaatcttctctaaatttttctgcctttaccattttactcaaatctttattggtagctgatattattctaggatttatttttattgtggtatctccaccaactcttcttatttctttttcctgtaatactctaagcaactttgcttgcatactaagaggtaaatcggcaatttcatctaaaaatacagttccatcttttgcaagttcaaatatacctattcgaccctttttacttgctcctgtaaatgcacctgattcatacccaaaaaactcactttcaaataactcatttggtatggcactacagttaacaggtataaattgaccttttctctcactataatcatgaatagctcttgcaaatacttctttacccgtaccactttcaccccaaataaatatgctactatttgttctagccacttgttttgcaatcgctttcgatttttccaatttataacttttacctaaaatcttatcaaaactacctttagataaatttttgacttcgttctttagatattttaatgtatcatttactttttcaagttcaagagctaatatcttagcttctgtaacatcaacttctgtacatacaacaccgataaattcttctttataaaatataggatttgcatgaactaatgcatacatattttcttttttatctgtaaaatacaagtcactcattccaactttactatttagtactttttctgaaatagtattttccaaaaattcattcatcggtcgaccaactatatcttcagactttatatcatacctttcctccataaacttattccacaagataacaacaccttcgttatttatagcacaaattccttctttaatttgacctataatatacttcaaagtcaatccataatcttctaaatgcatatatagatagtccctaatgtgctcttgttttagaactccaataattttattatctctaagaacaggaagaatccctatattttttaatatcattatatctctacattcatctaaggttaaaccttcgttgacatatattacatccttcttcattataagttttactggttgaccttcatactttttatgcatctcataaagattatgtatatccgtcatggatataatgccttttaattggtcagatgaatctattaccattagagtttttgtgttgctttttatcatttcttttattgcatcttcaattcttgtgtcttcgtctatagttgtaaattttgtatccattacctcttctactttttttacttctggtatcgaaaacataaagtccccccctttatagtagtacctcatcaaaacttatttatatatatttattctagcatattataataattatttattaaataattattattaaaatttattaagtaattagcatttaaatttatataatcactttaaaatttataattaaatttatacaaatgaaatcaaatgaattatacccttagtatattattttttcaatactattttcaccttcaaaacatttttctattcatcaaacaattaatgaatgcctgtatccaatcataaatttaagaatataattaaaatagatatttttaaacaaactatatttgcatattatatttacataaaaaagtcccaaaatgacttataaatcaatttgagactttttattttaaacttaataataatataaattaatttctttttataaattaaggcgtaaaaccactatacctttaggttggtggatgtaaacctatcccttactttgtatgtatttttcaatcatttctttagaaacatttcctacactgaaagcaaagtatccatctgagcaaaaagttttttctgtatttacatacaaatatcaaatgtaccaataacaaacacttagaatggtttctactaacataattcacaactccaattcaatcccttcttaaatatatatggtttaattagttttacatttggcacttttttgatttcttttaaagctatatattgccctcaaaatacattaaaaaacatccttagaagtaatttttaagttttacttctaaagatgtctaacttctatttatctattattttatttttaatcttacgtcaccttttattcttcttattaatgggtgattaactgttctcattacatggtcagtaatatgatatacacctaactttaattttggtgcagaacccattactgtgttactacagtcagtacagtttcctattaatataacttctgctccagctttcttaaattcaatacatttttgagcttgtcctggacagtgtcctggattttcacattttaatgcacctttaatttcttgagcttgtttacatttttgaactgatactatatcagtaactcccattttagttgctatatctctcattctctcttcattaggtccacatgcacagactaaaagacccatttttctcttttcattaacaaatggcatagtaactattataccaccactagttttagttattggagcatctaaagtagtagctttaccagtgaaaggtcctcctaggattatttcaccatattcaccttttattccaccagctctttcaattaattctccgacagttgttccaattggcacatcttcaaatactatagactcttttccactgtttaattgaccaactacagttatatttttagatataactggtcttttttgctcaacagcctctactattctagttagtgtttctacgtttattactactgcattagcctctgaaggtaattgagttggctcaagtaattttcctagaacgtctcttactattgctctctcttctcccattgggtacatatcaactagttctgcaacttctatgttgtctcctggctttattacttttttgaaagcttctattgcttttggatgcttgctttttattgctagcataccttttccagcattagtaacttccatagcatattttataccttgataaactatttctggtctttcttctatttcttttatattatgagctaataaaggttcacattcagctgcatttgctaatattgttccaccatttaaatctatgtttaattttacatgagtagggaatcctgctccacccattcctactactccagcttctttaattaagtcaagtataccttctccttttaatggttcaaaagtatcttcttgtacttcatcagcttcaattactatcgcttggtcatttatttcacttatttttccactaacactggcataaatatttgcccctaatccagttggttctgcgattagagttcctttttttactacatctccaacacttactactggcttatctggaccaccaacgtgttgttttaataaaatagaatatagtttgttcaactagtacgcccccttaagtatattaatttttttataagctgttcaaataatgttaatgctatttttctattataaggtcttaacatattgtttatttctatagaacatatcgcttattaacaaagcaatttctatgccaacttttaaacaaacttataccctttggaaatactgtcttacagcattcattaattcttctaaatttttaaatccatcaaaaaaaagtcaattattagacacttttttaatcaatttaatctataattattgatattgcatacatgtataaaaagtgtcaaaaaatagacaccgtctttttatcgacacttttctaacatatactatataatttatcacaactttacttaaaatatacatttattacttattaattcttagttttttgcactccattggaatcaactacataattatctttatacaacaaatcagatattttgactagactgtatccatctttttttagtcgacttattatagtatccaaatagttatctacatcatttatattagcatggaataaaactattgaaccaggttgagattcttttattactttctcaattacatgatttggtccaagctccttccaatctatagaatctacatcccacttaattactttataacctaaatcactacaaatgtccatagctttattgtttacgtccccaaaaggaggtctaaataaattagtcttttttcctgttatattatatattttttctgatgtagtttctatctcttttgttatgtcttcttttgatatttccttcaaattggcatgagtgtttgaatgatttccaatttcatgtcctttttcatctatagcttttacaatttcttcattatcatccacccaactaccaactaaaaagaaggtagcttttacattatgtttatctaaaatttttaaaatatcatccatattatcagttccccatgctacatcaaaactcaaggctatttttttctcatttgtatcaactttatatataggcatttttgaattgtcgtatttagaacatatgtattttattccataaacaaaaacaaatattaacactaataataatgaaaaaaataaaacactatatatcaaagctttagtccttttaacttctcttttcatactattccccctttgaaataatttcttctatatttaaaatttattttttttcagctcaaaaaagtactgtaatatttaatttataagacaataactaaaaaaataaaacctatattgacctaattaaactctctaaaatactcatttatttaatttttttatattttttacatttttacctttatttttctgtatatattatttttattttggagaaattagtattaacatcacataaataaaagtgttgttagacatcataaactaattatttgaggaggaaatttactatgtcaaattcaaacagaacagtagttccagaagcaaaagctgctttaaaccaaatgaaattagaaatagctaacgaaataggtttatctaactatgaaaacatagataaaggtaacttaacagctagagaaaatggatatgttggtggatatatgactaagaaattagttgaaatggctgaaagacaaatggctggaaaataaatagtaaattttgacacctgggtatcaacagggctgctaattagcagccctgtttctctatatttatttataaaattgttttatatgaattattaaagattaataatacaatacaaattgttcttttaattttgtacaaattagtttaatatattatatatagaaatagtttgacggaggatgatatttatgtttgaaaactcgtctgaagaattagcctatcacaaacttttaattttatatatattagaaaaaattaaaatggatttaactaattctcaaataactcaagtagtattagagactgagatgatgaattatttttcattacaacagcttttatctcagcttatggaatctaagtttttgactacatataaagactctgacagagaatattatgctcttactcaaagaggcgtagaaagtctagaatacttctttaatcgaatacctactagtgttactgaaaaaatagacaagtatatagattctaacaaagaaaatctactagcagatactcaagtaaagtctagttttgtaaaacaaagtgataatgaatttattgtcaaccttagagtcatagaaaatcagtctaacttaatagatttaaatctaaatgtttcatcagagaaacaagcaaaacttatttgcaataactggaaaaataatgcatcttatatgtatgccgaagttatcgatttacttataagagacatacattaaagcctacaaacaaattatagttgtaggctcttttcctaccttgatttcttttattaatttattgtttgcagtttcataaacttttactgaattttcttgtgtatctgatacaaatagtagcttttcatctttagatatttctaagccttgaggaatcccatttatttcaatatttccaatgtatctactcgttgtataatctaaaattcttacattattataacccaaatcagcaacataaacttttttgccactataattaaatcttatttctactggtaataaaaattcatataataccttttttatatccatgcttacttcatctattattataagctttccatcaagtgttgatatatacatttctttcttttgtttatcaagctctatatgccaagctctaaagtccatatttattttcttttgtatatttttattaattgtatctatacatactatcgagtttatacacggtacatataattttttactttctctatcaaagtcaaatccatgtggcatattatcaactccaataattcctattggatttaatgtgtttttatctagtacatatatactattagaatcttcatttgccacaaacaattcattatcactaagtacaacttgactaagacttcctcctatagagacagtatcaattattttatcattacttaaatctaagacataaagtatcccattacttgaactaggtatgtatattaaatttttttctttttctatgcaaaaatggtgtggatatatattatcttctaatactatttctttttctagttcaagtgtagaataatcaactatgctaatactctttgataagtagttagaaatatagattttcatataacccctcctctctacaatacatatactacaataatatattatttcattagcttgtattatgctttatagttgcattattacgcatatatttggtattattattattgttaaaaaaagaaataatatttaatggaggtctttttaatgaaagtaacatttaatccaagtggtgtatgttgtagagaaatgatttttgaagttgatgaaaataatgtgattgttgatgctgagtttataggaggatgtaatggtaatttatcaggacttagaagcttaataatcggccaaaatgctcttgaagttgctgataaattaaacggtattgactgtggtggaaaaggtacttcttgcccagaccaattatctaaggctatacgtcaatctatataattacttatataaacatcagtaaaattattaaaaacttactttatataaaaagagttgtccattttttagacaactcttttttatatctttatttgtatatttattttataaaattataatttctttactaaagttctcactgtaccaatcatatataatgaacctgcacttattataatatcatcctcacttgatgtttctaatgtataatttactgcatcctctatctcatgctttgatgttacatcatctacatattttaatactttttctcttaatatatctgaatttatggcccttgggttatttggtgttgttgttattaccttattaaaatgtggcaacaatatctctaaaacactatcaatatctttatcttctaacatacctattaataaggttaattttctacctttaaaattcttatcaagtgcttttgccaaagattttgctccatcttcattatgtgcaccatctattataaaaattggattttcttttatcttttctattcttcctggccatttagtatttataagtccttttcttatagattcttcatttatatttgctaatttatttatgtcttttagatattttattacactaattgccaagatagaattgtttatttgatgttcacctatcaattttatttcaaggtctctataagtttctttcattacagtacaatcgtatatttgagaatttatatctgatttttttatgtttatatcatcaaaatcaacttctatatatttagcttttttctctttacaaactgactttataacatccttcgcttcatcagtctggtcatatactagtactactccattttcctttattattccagccttttcgtacgctattttttctattgtatctccaagtatacctgtatggtccaaacttatagatactatcacacttacaagtgattttgttattatatttgtagcatcatatctgccacctaaaccaacttctaatgccacaaagtctaccttttgttctgaatagtaataaaatgccattgcagtaaccacttcaaattctgttggatatgcatagccttcttttaccataatctctattttttcttttattaactcaattattctagcaacatcatcctgtggtatattttgtccatttactcttatacgctcagtaaaagtttctaaatatggagatgtatataaaccaactttatatccacactctcttagtatattagaaacaaaagaacacacagaaccttttccattagttccagctacatgtattatattcaaagtttcttgtggatttcctaataattctaataactttccgatattttctaatcctaatcttataccgaatttattagtttgtgatatgtactctaatgcttcttcatatttcattatctaactccccctgtattggcattttctcttatgctatctaattatagtatattttttacttttaatctaccgacaaagaatacatataatttaataccttctacattaaatttagctacaaatctttatttataagtttttatatctttccactaattcagtcagtgtatatattgaaactaagtcatattttgagatgtccatataattaaactttatgtcaaatctatgctctagctttttcaacagattaaaacaattatcataaaccaaacctatctccttattaaaaaggctacccttaaagagtttttcattattatcttcaatatctaaacaatccctaacaacgtcagcaactttcataagaagagcattttctttgtcatacaaatccaatttaaagtttacaattctactacactcatcaaaatcacaactatcccaatgatttctagttgctaatgattcaagcttatcatttaaatcagatattgttatgcctggtttttctgataatatcttagctattttaccagtaagctttgctgataaataactattacattttggtggtaatctataggaattatttatatcacaacttatatatgaattgctatccataacacattgaacatcatattttttgttgtaccaaaatgaatcatctccatctaaagtaaatcctcttacacctataacattgttaaacatagctggataacttaaatcaaaatcattagcgagtgaacatactattatttttccttttctaaacaattcgtaacaaacttcaaataagcccttaacactctctactcctatgactgataaacttaaattaattaatcttatgttagtgtctaaaaggtatcttaatgcttcttcaagaacttttatatttgtaataccatcttttctcaaaatttttattacaaataactctacatcttcatactctttctttattattgatgcacaagcagttccatgaccatcttcatcatcaaatttatctgatataaagatataatcatgcatacattcaaaagcaattcctccaactaaattatcttttaagtaatcatgttctttgtctattcctgtatctaatactgcaaccttaactttattattcatatcacatatattctccattacaaaagtttttaatatatctatgttaatagttcatcttaaactttgatttaagttgcacaatttatcttttaaatgctatatttcttgctaaaaacataaaataagtacaccatatatttaatttatatttattatatcaattattatcattaaatggttaaatgttaagataaaatttttagatttatatcacaatttaggattatttgtaaaaaaggagattatctttttattagacaatccccttgtatattttattaatatttatctatgattaagcatcaattttattttatactttttgattttaatactatacatctaaatcttatttagggggaacaattatttatatgatataaaaatgctaatttgaatgaacttgtcttataatcagttttataaaatacaccattctacaaagtatgaatcaaaaggtgaaaaaatactaaaaataataaatcaacatcaattttaaccaatatatgaaaaacttataccaagtatgcataaaaactaatataaatattattttaacaactaatacttacacctttatatattatatcatatttcaataaataaattgcataaaaggaaatcttttcatagaattaaaccatttattaattcattactataggttcaataaactataagatgtcgctttaatatttatattatactccattaaatattaatataattaattaaagtatgcatagctaaatgaaacaaatatctatagagttttataaatagtcattattttaaaaaggtaatcatattctaaaaatacatataatgcatataaaaatcaataatagtatattaataatcaggctactaattaataatcatgctactgtaatggaaactctacatatacatattaaacaatattaaaagtctataaactgatattttgcataataaaactgtcttaatataaataacattttatatattaagacagttttaatcaatagccctgtgatgacattaaatcttttttacgatattttcaattacctttttaaaattaatacattatatcacataacaagcttgttaatgctacttttaaatctttaagtctatacttacttataggtataaattgttcattaatagtaatcatattatccctaagatcttctattcttcttaaattaacaataaaacttgtatgacatctaaaaaagccattttcacacagtaatttttctgcttgtttcatgctcatattagctttataatctctacctattgtatgtacaactaaatctctctttacagtttcaacatataaaatagaatctatcagtattctattaaatccttttttactatttaaaactatataacgctccttctttctttgaaggttatcaatacaaagatttacacccattgcaaagttactatactctataggctttactaaatatctataagcacgaacctcataaccttggggggcatactctgaaaaagctgttgtaaatataatttctactttttcatcaaactttcttatttttttagccacctcaattccattgatatctttcatttggatatctaaaaatataatatcaattttttctgggtatttggatattaaatcttctccacaggaaaattccagtatttgataatttagacatctttcagacaaaagtttttttgtaaactcttttagtatgcttctttgtattttttcgtcatcacatataactaccctgaacataatatcacctccaaatctaaaatatcatttagtttactttatttcaatttccaaactgtactcactagctttcaaatttaaatttctttataaatttaagttgtcgattaaactacttatagaaattctctttaatatttaaacttaaattacgataaattcctatacttttctagatatattatgtaaaaaaatatagtaaaataaatataatatgtatttattaccctatattaaacatcataatatatcaaatttttattgcttataaattttaagacataaaattcatatattcacaacataaaataaaaatataacacatctgtaaagaattataacatcatatttgtatatatataaagaaaaacatacaaaaagtatagaatatatactttttgtatgtttttactaattcttatatttattttattttagattctaaatttgttaatctttcctcaacagatttaatcatctcttcaaatttttctttttttactttttcttcttcaattaaactttcaggagcttttgctaagaaaccttgatttgcaagctttccattaactctctttatttcgccttctaactttttcttttctttagacaatctctcaatttctttttcaaaatcaactaattcattaagaggtataaatatttcaacaccatcaataactactccaactgcatcttctggaacattagatttatcttttgctatctctacatttgaagcagatgctagagttataaaatagtctttaccaagctcaatagcttctattttttcttcacttgggattattatcaatttagctttcttagaaggtggtacattcatttctgctctcacatttcttatacttcttataccttccatcaataagttcatcatatcttcttcttcagccatgttatcttcttcattatattttggccattcagatactattatacatccttcaacagtaggaagatgagtatatatttcctctgttataaatggcatgtatggatgtaataattttaatattttttcaagaacataagttaatgtatataatgctgcagatttagcatttgcatcttccccatataatctaggtttaaccatttcaatataccagtcacagtattctgaccaagtaaaatcgtatatcttttgaagtgctattcctaaatcaaacttatccatgttattagttgcttcttttacaatattatttgctcttgatattatccatttatcagctagagttaagtcctctttaacactttctctagtcatgtttttaattatatcttcatcaatattcataaatacaaatcttgatgcattccacaacttatttgcaaagtttctagcaaattctactctttccatatagaatctcatatcatttcctggggaatttccagttgttaatgtaaatcttagggcatcagctccatattgctcgattatctccaatgggtctataccatttcctaaagatttactcatttttctaccttgagaatctcttactaatccatgaaccaaaacatggtcaaatggcttttcattcatacagaacatacctgcaaatgccattctaactacccagaagaatattatatcgtatcctgtaacaagtacacttgttggataataataatctaaagcttcagtcttatttggccatcctagagtagagaaaggccataatgcagaactgaaccaagtatctaaggcatcttcatcttgtttaaaatgagtgcttccacatttaggacacttatctggcatttttctagcaactactatttctccacactcttgacaataataagctggtatttgatgaccccaccataattgtcttgatatacaccaatctcttatattttctagccattgtaaataagttttatcaaatttatctggaacaaattctaattctccttttttaagaatatctatagctggttttgcaagttcttccatcttaacaaaccattgctctgataatctaggctcaactactgtatggcatctataacaagttcctacattatgattatgcgcttttatcttaattaggtaaccttgttcttttaagtctgctacgatagcttttctacactcaaatctatccataccttcatattttccacaaacttcattcatagttccatcttcattcatagtatttaactgctcaagattatgtcttaatcctacttcaaaatcattagggtcatgtgctggagtcatcttaactgcaccagttccaaactctaaatcaacataactatctgcaactattggaagttctcttcctactaatggaagtattgctgtttttcctattaaatgtttatatctatcatcttctggatttactgctataccagtatctcctatcattgtctcaggtctagttgtagctatttctaaaaagtcttcactatcttttagtgggtactttatatgataaaagtttccgtcgtgttcttcatgttcaacttctgcatctgataaagtagttttgcaatctgggcaccagtttattattctatttcctctgtatatgtgacctttttcatataggcttacaaaaaattctataactgcttcattacacccttcatccatagtaaatctttctttatcccaatcacaagaatcacctagttgtttaagctgattagatatttttcctccaaattcatctttccattcccaggctctctttaaaaattcttctctacctatttcatactttgtcttgccttcttgtttttttattctttcaacaactttaacttctgttgctatagaagcatggtcagttcctggaagccaaaaagcttcatatccatccatacgtttccatctgattaatatatcttgaagtgtatggtcaagagcgtgtcccatatgcaattgccctgttatatttggtggtggcatcattattgtaaatggttttttatctggatttggtttagatttaaaatacccttcatccatccattttttatatagcctagcctcaaaatcttttgggttataagtttttgataaattcgtattttccattgtcctgcctcctgtattttataaataaattttttaaatatctttagaaataaaaaagagctcttcatcctctttaaaaaggacgaaaagctcgcgttaccaccttaattccaaagcttaaaatacattaacatataattaaattattagttaatgttattttatcaactttgactctcaaagaatttaacggttctaaccgtctaaacttacttatagttcagtttagaaactccaaagctacattcagtaaatcttatacttagaaaatcttacagccagtgaattttcctctcttttagtagtatttacttactcctcttcttctcagtctttaatattacatattattatatacaaatattattctctttgtcaattatttttattttattttttctgaattttcttaattatgtctattctcttttatatagttgttatattttaaaatatgtttttacagttattctgtcttataatgtcaataattgcaagattattttattttaattttaatgctttctcattaattttatattatattatccttacagtatacctcttattcgtattttttatattatatgttttattttataaataatttactttatcttttactatatttaaatttattataagttttcttgccagaaatttttaggtgttatattttctgtaattggcaatattgtatatcctctctcttttaagattcttataatattatttaaagcatttaaactttgctctttctcatgaattaatactactaattcatctctttttcttccataatataatatattacttactatctgacttgtagaagacttccaatcctgtgtatccaaattccagtcccaaattaaataatcatttgccataagtttattatatgaaccttctggcatatatggtttacttccgtatggtaatcttattaattttgaactctgaccagttatttcttgtagagtattattgcatgtattaaattccccaactgttacttctgggcttttatataacttatgtatatcatgacttacactatgaaaacctattgagttttcctcttccaagactctccttacttcttccttgtgatttttcatattttgattaagcataaaaaatgtcgctttgacatcattttcttttaaaatatcaagtagtgcatttgtatattttgatggaccatcatctattgttatgtatgctactttttcagaagtagcccctggaccttttgtttcttcttgagatgctttgtatatgatttctcctaaagtattactttgagaaagcagttccagtgtattttcaccttttgaacttatattttcaactggaacattattaattttttcctccaataatgttccagttaaaattaaaacagctataagaaatatccttataaatacatgaaaaacagccttattatctttaattttcatcccccatatctcccttttataaaagcataagtttaagacttaaaaagttattttttatatttattctctttcttattactttttatatctctactaaatatttttttaaccttttcttcttctttttctcctaaagattctactcttttgattcccaaagaagttaaaaattgtaatacatttaaattatcaaatggagtttccatattcgtactttcactatattcatcaacattcttagtaccttcttccacacttaaaatacgcttcggacctcctacacagcctcctacacaccccattccttctataaatgtagcttctatttctttatttagaactttctttagaccgtccatgcactcttttgttccttcaaatgccttttcttcaaattttatatttttgtcaattcttctgactgataacttaactgctttacttacacctcctgttctagcataaactctacctgaaagggacgcctctactctattactctcatccattattgctggatttaactctaatgcatcaaatatttcttgcaactctttaaatgtaagcacaaaatcaactgcatcttttatatcttctaacattgcttctttcttttttgccatacaaggacctatgaatacaactttagcatctggatttaaaatttttacagctctcccacaagcaatcataggagaaacggatggtgatacattctccaatatctgaggaaaactattttgtatcaaactaacccaaataggacagcaacaactagttataaagcatccttcttcgtcctttttcatatgctcataataatcatatgcttcttttgcagtaagcatatctgctgccaaagcaacttctatcatatcttcaaatcctatcttttttaatgcagttcttaatttaccagggcttacatctttcccaaactgtcctacaaaagctggtgcaactattgcatatacagggctctttatatcttttaacaattttatcattggtataaattctattttatctgaaattgcacccaacttacatcttgatacacaatcaccacaagcactacatacatcttcctcattacaattaatatgcttacttcttatcttacatgactcatcttccttattattttcatcacaatatttgcaagcatctgatattacagatattattggtcttttgacttcatctaaatttacagcttcatgtagtgactcttttaaatttttatctgtatcttctgtcacatccaatcccatagttaccctaattaaatttaccatagtatctttatcaaattttccactaaaataattatttaaattatcctttaaatcttcatttaaaattttattaggtaagttttcaatatcctctatatcatcattccacactgcttttacaagttcgccaaaaagcttcattttatatatttctagtattttagaattgtcatttctagtattcataaaaaatagtacctccataaattaaacttatatatgtttaatatttacaaagatactattttttatttattatttaactactattattaatatgatttatttagctttctcaacaactctatttcaatcattattttcattagatgatagttgaatacggggcttttttcttcatctatattccagtctagcttatccacattatatgttttcttaaggtatttatatgtatgctctttcaaataaagtttattttcaagtaactctatagactgcatatgaaaatgtatttctctacatatccttaaggcattctcaattttttctatattagtttcactcaaactataatccaactcatcaataagttttgaatatatttcttctaatttttctacttcttcttcaaatttctctacatttaaattttcttttctaagaattttatcttcaataagtaacattgaaagttcttctatctttttaaattcatctataacactatttagataatttggtctagccacataataattaacaagtactccaaacaaaacacctacagatgtatctaacactctatgtaaagaataatacacagggtcactatttcctacacctagatgtatagccagaaaggttacacaggcaactactactgactttattttaaacagattgcataaatatattgagcacattactcctagaccacataaaaaagggtctccagctttaatgatggcaaatatgaatcctattataccacctaaaatagtaccttccactctattgattcctgtctttaaagaaccttttaccgtatcttgaacagaaattatacatgctactagagaataaaacatattctctactagatagttaccaagaatcatacataaagtgacactaattcctgtttttatagtcctcatacccatcttttgaagtttcaaagttccacctcctaaaaagcaccttatataaaatacgcatcctcatatttaatatgttcctagtatatcacaattttttaaatttacccattaatcatatttttttatcaattctttcttaatttagacaataaaaaaactgctttaaagcagttttttatcctatctcaaccattttaccctcaattgcaaaaattatcttctcacatacatttgttatatggtctccaattctttcaaggtatcttcctataagtagaagttttactccttggtctatagtatttgaattttcatgcattatttttaaacaatcaatttgtacttgttcatacaatccatctacaatatcatctttagttccaacatcataagctatacttgcatcaaataagattaaagcttctctagtctgagacatcatagacttacattcttttgccatcttaggaatatctatcagctcttttatataagcctctccacctatcttcaacatttctctagctatatttgctgcataatctcctattctttccaactctatcgatatattacctaatgaataaataaatcttaagtcccttgccattggttgctttaatactattagctctatactcttatctcttatttcttctcttaatttatttatttcttcatcatcttctactacttttcttgcaccctctaaatccttctctatcatacaagtcacagacttttctattgcttcttcacatttttccatcataagtactgtttgttcttttaaagtatcaatacttatatctaaactattattgaccattgtctaactcctttatagttatatattttaaccaaatctacctgttatatagtcttctgttcttttatctacaggagtggtaaacatagtttttgtatcgctaaattctataacctctccatttaagaaaaaagctgtttcatctgatatacgagcagcttgttgcatattatgtgtaactatgactattgtgtagtctttttttaaatcctctataagttcctctacttttaatgttgaaattgggtctaaagcagatgtaggttcatccataagaataacttctggtctcatagcaattgctcttgctatacatatacgctgttgttgaccaccagaaagtcctagtgcagatgatttaagcctgtctttaacctcatcccaaatagctgcaccttttaagctttcttctacaattttatctaattgcttcttatctcttagtccatgtgtacgaggaccatatgccacattatcatatatactcataggaaatggatttggtttttgaaataccattcctactttagtacgaagatttataacatcatctgaggtatatatgtcctctccatcaacagaaatgtttcctttaattgttacatcttcgattaagtcattcattctatttaacgttcttataaaagttgattttccgcatccagatggacctattaaagcagtaaccttattctcttttatatccatatttattttctttaatgcttgcttatcaccataaaataaatccaaatcttttacactcatttttatcttatcgattaattccattattcacacctcttaaatttaataattagctttatttaatttcttagcaacaaatcttgctagcatgtttagtgctaatacaattactattaaaacaattcctatactggctgctgttgctatatctccactctctttagtcagtaagtatgagtgtacagttaatgttcttgcactatcaaatattccacctggcatcttggctacagtacctgctgtaagtaatattgcagctgattctccaattatacgaccaactgataagattactccagataagattcctggtattgcacttggaagtactaccttatataaagtttgaaattttgtagctcctaatgccaatgatgattctctataagcttgaggaactgtttttaaagcttcttctgttgtacgaattattactggtaatattattattgcaactgtaagtgaacctgcaactatggaatatcccatttttaatgtaactacaaagaaaattcctccaaataatccatatactatagatggtatccctgataaactttcagttgcaaatcttatagctgtaactgcttttccttttttagcatattcttgtaaatatatagcagccaatattcctataggagttgctacaactatagaaactactactgtatataatgttgtaattatcattggaagtataccaccatcacctgatgctgaataattgctaaataagaaattaaaattcatgttgccaattccctttataaatataaatcccactataatgactaatgatactattgtaaatagtgctgatagatatactaatgacttcaatagattctctttgaactttctcatcttaatttaccgccttatttgaaagtttatttaaaactaagtttaaaattaatataaatgtaaacaatactactccagttgcaaataacatttcttgatgtgtaccaaatgcgtatcccatttcaagtgctatattagttgtaagtggtcttacactatctgttattgcagttggcataactggtgagtttcctgcaacaagtattactgccattgtttcacctaaagctcttcctactcctaatactactgcagctaatactccagatttcgcagcaggtagtacaactttgaatattgtttctatttttgatgcaccaagtgctaatgaaccttctttgtatgcttttggtactgctcttattgctgtttctgatacagatattattgttggtaacatcattactgctaatactattactattgctaacaaactttgaccttttggaagattaaatatactttgtatagttggaactatcactgcaagaccaaatacaccatataatactgaaggtatacctgctaaaagttcaactgctggtgacattatttttgctaatcttttaggtgctacttctgctataaatacagaggttaatataccaacaggtactcctatcacaagtgctccaagtgttgcaaatattgatgctactatcatagatgatattccaaatttattggcagaaggaacccaatctgcaccagttaaaaagtctataaatgaatatccttcaaatataaatggtcttaagcctttataaaatacgaatcctattatcaaaagtaaacttgcaactgctactaaagcactaagtagaaaaatattttttgctactttttcaattacgtattttgtcttattgccattattgtcatttttttctaaacctactaatctagattttactatcataataccctcccattaaaatatacttatcgattttcgttctgtattcaaaatttaattttttataattcgtcttcatcaaatttcctgtacttttattctactttttttaagttaaatctatattaggattaagttaagcaagtgtaaaattatatttacttttttaacattaattttacttttaaaactatatttgacatttactttacaatatactgttgtttctctatattaaaatagcagatatagataataatacagtttatgtataatttattacctatatctgctattaagatttgttaactaaatttaacttttatactacatatataattatcgtatcctctagtttatatcactattatttctatcaaattgttatgatacttgatgtttgcaataggtacgaatagccaaaaatataaaaataggtatttctatcactgagaaaaacagtataatgtgtggtgtccaaaaactcatacctcctaagtgtaagaaattaaatgatgtcatttgatataataaactaatcttaagaccaattccccctggtggtaataggtatccaatccaactaacacctattcccataggaattaagcaaatagaaaaagcaatcagcatagaagtaagagaatccttacattttgcagataaaaataatgttaaactaaccattgcaagtattgaaattagaccaccaatagctataagaatctgtgcttgtagtaaatttatatttactagactaatgacagaaaacaacatttgaaatgaggttttcaaacattcagtaccaaaagctaaatcagaaattgccaaatggatagaaatacatacaacaaacattactataaatatagaaaatagagctaatattttagtaaacgctagacgagtatgtccatgtttcgtacaacgaaggatgctatctgattgtgtctgatactcaccagaaaaagtaggtgcagtaattgcaacacatataattaataatataaaaatgtaaaatattatataatcgaaagcatctttagaataacctgggtatatctcaaatggagtatctacttttctataaagttcttgagctttcatttgtgcactggaagtttgtcgttcaatcttcataatatcatttaaatgagttttgcattgttcataaaaagaatctaaatcatttgtatttatttctgataattctgttgcaaatcctgtttctgaattagcaaatgcttcaggaagtctattcaacaatgggcgtattggtaaaatacttttagaataaatatctagtgggaaatcttcactacctactttaccatacttttcttctgtttttttccatatatttaaagcatgctttaatttttttggtgttacaactccactactaatttcactattattagcataaattgtttttttatatttaatagcatctaaaccactcaattcaactaccttgccattattatctaaataattgataccctcgtaagtaattggaagaaaagccatcaatgcagataaaaccaatgccaacaataataaaattaatgtacgacgtgagtgcaacactcgtttaatttccaaataaaaaatacgcatttatttcccctccttactataaactgcttctggaaataaccataaatataaatcttctagtcgtggttcaacagcaatagagttatcaatttgtgacttttctgccaagtaacgaatagatacttgattgtttttttcactacgctgattgattatacgtaaattcatttcatattttgaaatatctctatttgatataagacattcccatactttgccctctactttcttaaccagtttatcggttgttcccacatcaagaatttttccacttttcataatagcattttgagttgatatgtactcaatatcagatacaatgtgagtagatattaggacaacacgattatgagaaaattctgaaataaaattacgaaatctcactcgctcaccagggtcaagccctgctgttggttcatccattataaggattttagggtcatttaacatggcttgtgcaattcccactcgtcgtttcattccaccagataatttaataatctttttattttttacatcagataatgtaagaatttccaatagattattaatttttccttttacttctcttggtggtacatctttcaatgctgctatatattctaaataatcttttacagaaaaatcctgtgggaaaccaaattcttgtggtaaaaatcccagtaaatttctgtactcagcacccattatataaatattttttccattatacagaattttgccattggtaggtttcataatgtctgtaataattctcatcaaggtagttttacctgctccgtttgctcctagaaatccccacacacctggtgttaaggtaaggcaaacatcttctacagcaattttatccttaaatttttttgtcacatgttcaatttttaattccatatttgaaactcctctctttatctacttacctgcaaaaacaaaagtgtcttgcttagtatttattttactaaacaaagacactcataattttaatattaaatagataatttcttaagaaaatcctaatatttgatttatattttactaaatagatgtaggaagcgatatagtaaatgttgtgacttcatctttactttgaacagtaatatcaccaccatgcaaatttataatttccttagctatagaaagccctaaacctgcaccacccatatcagattttctagcttcatctaaacgattgaacttttcaaatatagcagaaagttgttcttctggaattgtctgtccataatttctaaaagcaatatctaccttgctgtctttatgaaccgctgagataataatttctgtattaggatagctgtaagcaatagcatttttcaagatattattaaacactcttgcaagtttttcagaatctgcttttattgttaaactttcatttgcttttagaatggctctatttcctttttcagacagcaatgggtaaaattcatcctttaattgaagtaacatataatataggtctactttttcgaaattaattttgatttgattagaattatatcgtgttatttcaaaaagttcattgataagtttttctaaatattgtgctttgtcaagtgcaacttcagtatacttagatttttgagaattatccatattaggtatttcttttaataagctcaaatacccaataactgaagtaagtggtgtccttatatcatgtgctagatacatcacaaggttattctttttattttcagcctctttcactgcttgttgacttaacaaaacagacatcttaatttggttcatttgttgctctatttcctttaatggcttagatagttcaaccaattcatcattttgttgataaatagtatgtgttgcattgatgatttctcttaaataattccatggttttttccaataaaaattgaaaatagtgatatatccaattataaaaaccaaaaaaaataatacatctcttctcaacttaagccatttaacaagaggatttgaaaaatttgaaaacgtataatcagccataaacattaaaaccaatactatacctgtatagatagctaacattatatataatttatactttaaatacgcctctgtatttttttctctttttataaatttatatttatctcttagtttcctataagtaaaattattaatctttttcataatactacatcccttcttgacaagaaaaataggtgtcaaatcttgtaaccaacaccccaaattgtttttatatattttgcttcatctacagtatcacctaatttttcacgaagatggcgaatatgaactgttatagtattgttacttttattgtaatattcatctttccagatagcatgaaaaagattttctgaatttaccacagagcctttatttttcaataatacatgtagaatagaaaactctgttggagtaagtgaaagagctttaccatttaaatggcattcatatgtttgggtattcaattccagacctaaaaaagaaaaaatatgtgaaagttcttcaccagattgtaaacttccactgtatttcttatatcttctaatctgtgccttcactctagcaacaagttccaaaggtcggaaaggtttagtaacataatcatctgcacctaaagttaagcctgtaatcttgtctgtttcttcatccttagctgttaacataatgattggataagtatatttttctcggattttttggcataaagaaaatccatttactcctggcaacataacatctaaaattgcaaggtcaaattcatttaaattaatgcagtttagtgcatcaagaccagaataaaatttataaacaatatagttttcatttgtaaggtagacttctattaaatcagctatatcacgttcgtcatctacaactaaaatttttccactcatagactttaaacatcctttctatatatatttatatatattatactaaatttaatttttttatatgattttttacattagaatttattaagaaattcttaatcttattatgtaactattttattatttaacatatattaaagataaaaatgaatatatatagatttagatatacaatttatctatcttttcaaatataatctataaaataatagttctgttacgcattttttcatataataaaactgactgtaatttaactggcaaagtctagaagaataggctttatcaattaaattacagtcagctattttataataatttagtttagatatcgttagcatttcacatttataacaattattaatgagattaatatatttattattctttattaaaataatatcctgctcctcttattgttataattttctgaggatttttataatctttctctattttctttcttaatccattcactgcaactaccacactatagttatcctctaagtactcattcatccatacatgttcatatatctctttagtagtcagagtcttttcaggattctctataaaaaagtttaacagcttattttctgttggagtcaattttattattttgtcttctaactttattactccactagttctattatattcctctaattttgtattattttcattattatttacatatgagttcattcttcttaaaatagcttttacttttgcatataatatttctaaatttagaggctttattaagtaatcatctccgccagaatttaaagcatttaaaatgctttgttcttcatttatataagtcatataaacaattggacaagtagttacatttctaatttttttacaaagagtccatccatcaccatcagttagaattatttctaaaaatattaaatcatatttattgctaaatatttttccaatagcttcttcacaattatatgctaaatctatacttatttctttttcctccagaaatccttttagcttctggcaattatccttgtctccatctattatcaatatcttagtttgcattataatcactcccaaatatcattattcttttatattaaataagctattattataaaaaacatagacttaattttattgtaaaaacagttccttttcctagttctgaatctacaaagatttctccgccatgctctcttataatggatttgacaatatataaccctagcccttgcccttttggctcattattatctctttctgtaaagaatctgtcaaatacctttggtatattttctggaggtataccttttccattatcagaaactttaataattgcaaatccatcttctttatccattgataaaattatctttccatcaaatggagtaaatgtcaaagcattataaattaaattctcaaatgctcttgtaagcatctctttatttatctttgcatatatttttttctccaatatgtaagtttcaaagtttacaccacatgcttgtgtatctggcaagttattttcatatatctctttaataaaatcatttagacatattttttcactaataccaatgcttttatcttgtgatgtaaattcttgcaaactacgtactctattttgtacttcatttgacttttgatttatagcataaagataggttcttgtctcttcatctacatgaatattaccaacctttatcaagtctataaatgattgtatagctgaaacaggtgcctttaaatcatgtgccacatctgccaagaattttttacgttcatttaacaatgttgtaagttcattagttctcacttcaacttcatgttcaagattccttgtaagtttttcattctcttttattattattctattcctgtttatcatcataagagaaaataaaataacaattataaatccacaatattctgtttgccaccctgtaaatataggctcaaatctattactagtaactgcatcaaataatatgctaattccaaaaacagtgtttactgaaactaaaatataagaacttatatgctcagagcatgtctttttatatattgaaaccagcgaagacattaatatatatataaatacaatatatttatatatgtctattaatttcccatatatgttgacaaagtacatatcatatggaagaagaataattggtatcactatagatatgatactcattgtaattcctaatggtaaaattaaaaatctatacactttatcttcttctattttggatatacttccatttatacaaataatacataaaactaccataaaataggacgaatcttcaaccgcatatgtaaagcttaccaaaggcagtcctaacaaatgtacaaagggataggatacatggatggcaaagaaaacacacatacatccaaaatataagtaaagtttacttttgtttgaaagaaaccatacagacaacgaaaatatagctattgcaaaagttgtgaagcaaattatactataaaaaagtaatcgataaaacatcatattacttatgtcctttgtttctcctaatgcaggcggataatacaaaccactataataatgtgaaaaattcgatacattgattataatttctgtatctttctttgcaataaaacttactactgaatttttaattttgggtctatatttttctgttcctacatctcctaatttagaaactatttctccatttatccatacttcacttgcggaaaaaatctcaggaagctctaaacttagtagcttatcctcaccttcattttttattctcatacgataagtagcattcccatatggtgactgattcccttttctcatagaaaaatctggatattgacctataaaaacatattctggttttatatcttgctctgtaaaatcattcggtttaaatattttatgattataaaactcccagtcatctatcagaaagacaagtttacctttagtgaaagtatcattatctatagttaaaattccattacttgctctaatagacttatatgtatatttattatcatatttatacagaagatttaatcctgctattgccaacagagagactatcaatacaatgagagttccttttagtatattatactttttcattgcatcaaccacatctctttcatagtagtattaaataaaacaagaactatttattaattacagtatctcacttatggtacaaacttatatccttttccccatacggtttgaatgtattgatgctccctgcttaaagaattaattttttttctcatctgtgcaatatgaacctgcactgtatgttgatctccaatatcaggcattttccaaacttggttatatatctctatcttcgaaaatacttgttctttgttttcagctagaaacaataatatttcaaattccatagtagttaaatctatactttctccatcaaaagttacttttcttgaatttacatttattactaacgctgaaaactttaacacattaggaactgatgtaatatttttgtactgcctcatacgagcatatattctaagttcaagttcttttaaactataaggttttgttatataatcatcccccccagctaaaaatccccgaactttttcttcttcatgctcataattagataaaaatattataggtatgttaaccttttcttttatatcattgcacattttatatccatctatatctggcaatgaaatatccaaaattatacagtctaaaactatacgctctactatatccatagcatctttagcagtctctgatgtatatacattaaaacctatattagaaaaataaatttgatttatatttaaaatatcaacatcatcatctacaaccagtaaattatacattacaccactccattcaaaggtattttaatcataatctcaagttttataattattacaaattataatgttttattttcatatataactagtattattattttataatatctttacaaactagactataatacttaagtatttttgaacaattcttgaatattgtattgaacattaagatttattattaaatactaattaaagtctccgattgttggagaatggagcttaaagtcattttcacttataaatttattatttttctagaaacttgtctattggctagtttgagtattgatttatatgatttatatggttataatataaaataaattgtattattttggtaaatatattgttacaaaaggtttatattttgcatctcaatgtttataaaaactttattttcttattataatagtattatactttttaaaaaatttcccttttccaacaaatggctactttaaaagccaaaatttcacctatcaataaaaatcttaacgactaatactcttattttcaaattttgcaacatttttgttaattttaaagcaaaaaaagactatgcaatataaaaattatattcatagccggttgcaccactaactccatatatctccagatgcccaataataagatatacttctcagtttctaaaatatttttattaaaaatcttttatatattttcataaatttcttttttattctaacattgtaatattattttgtcaatatttccatatttttagatataagatactaaaatacctattttatctaaagatatttatatttctacattcaataatagacaataccctgcaagttaaagcatcatttttatgagcttatctcacagggtattatatgtttactttatattataattcatgttattgattaactttaataaatcctttttctgaaacaagtgcttgtccttcatcacttaatatataatctattaaagctttccctttttctgacaaaccatcttctttattaactaatataaatggtcttgatattggatatttattagccattacatttgcatcagttgcttcaacatcatttatttttaaactatttactttctcatcaacatatccaaatgatatatatcctatagcattttcatttccttcaactgtagtttttatatttcctgaaccatcacttatttgtgcatctttagttagttcttctgaatcaaaccctacaatttcttggaatccatctctagttcctgaaccttcttctcttgatactattactattggtgcatcatttcctcctacttctttccagttagtaatctttcctgtatatatacctttaacttggtccattgtcaggttttttactgagtttgcagtattagttatcaatgctataccatctattgctattttagtttcctttaatccagcacttttttcttcatcttttaaatctcttgaactcattcctatttcagatgttccttctatggcattttttatacctccggaagaaccaatctgttgtacttctacactaacaccttgatttttttcttgaaacttttctccgatagtttccataagaggacctattgaagttgaacctgaaacagaaactttgcttgaatctcctgaatcacctgaacctcctgagttagaactacatcctactgctaaagctccaactaacattgtactagctaaaagaacgcctattttctttttaaacattttacttacccccgcttatattttaattttttgttgtcatttttctatattttaataatacagattctttgttaaatgaatattagagcagggttaagtaaatgtaaatattgttaaatacatgtaaaaacttaattttatatgatttattcttaattagattaactttttaaagttactttaggcagatataaacacaatacaactcatattatcagaagtcttcattgaagctatcaacctatcacatcctataattctttttctagtttattaactaattcagcaaatacatttaaggcttcctctatagattcttttttagtcatatctacaccagcagattttaattgttctagtgggtattctgaccctccactttttaagaagtttatatatctatctactgcagtacttccttctgaaagtatctgttgacttaaagcacttgcagcagaaaaccctgtggcatacttatatacatagaagtttgaataaaaatgaggtattctcgcccattctattcctatttgtttatctactattgcagattttccgtaatacttttcatttaatttgtagtatatattagtaaattcatcagcagtaagtggttctccactctctaccctttgatgtacaattttttcaaattcagcaaacatagtttgtctatgaactgtagttctaaattgttctaaataataatttaataagtatatagtttcatccttagacttagaattttctaataaataatttataagaagtaattcatttaatgtagatgcaacttctgcaacgaatatcttatagtccgaatataaaaatggttgacttgttcttgaataatgactgtgaacagagtgccctaattcatgaattaaagtgaatagagaattaaggtcatttttatagctcattaatatataaggatgtgaatcataacttccccaagaataagctcctccttttttaccttcattatcatatacatcaatccacccttcatcaaaagcactttttatgaccttcaagtatttttctcctaaaggtttaagtgcctctaatatgatatcctgtgctttatcatatggtatatccatgtcaaatttatctgtcaaaggaacatacaaatcatacatgtgtatttcattcaatcctaaaaatttctttttaagctcaacatatttatttagattaggaatacttttatctatagctgatataagattattgtaaacatctaaacttacatcatctgaaaataaagacgcttctattgctgaattatactttctagtttttgcgtaaaatatctctgattttattccaccataaagcgttgaggcaaatgtatttttatatttctcatatgttgaaaattcaccttcaaaagcgtcttttctaactctactattcttactttttataaataaagagtagtttgaatgagaaagcttaaccttattaccctcctcatcttctatctcaggaaattccatatctgcatatgctaacatatcgtatacattttctggaattgtcgataattctgatgtagctgcaagtatttcttcctctcgttcactcaaagtatgtggtttatctctcaatatatcctttatatattttgtataaaaggatagcttctcatcttttaagtattcacttaacttattctcttctatcgccagtatttctggaactatataagaagtagccacacctaaatcagtagataacatttctgtcttagtggctcttccttgattatcattaattctagtatcttcatgttgtttcatatgagtatatacatataaattttgaacaatcctagatgcattttcagagatatttaatactttatataagttctccttactctcagaaagcttccctttatattcttttacttcttggataagattttttactttacttatgtctttttcaatttcctctttactggagtacatcttatctatcttccatttgtacttttcttctattgtacttctatcagttcccatatcatacacctctattttaatttgttttatattttattcactttacaaaatatattgtatatattttagtccaaataatctacatttattactccttctatcatatttatttctttcataacgtcgtgtaagtgtattctcttagcataagatacaaaaaaattaaccttccagtattcttcattacgacattctatttccatatttcttacgataagttgatttttttcaaatttatcatataaaaaaggtatagagtccaaattgcttaattttaatatcaatacattcttttcttggctaaataaaaacgtattgattatcctaagcacaaataatgctatcattacaaataatccacctagaattgccaattcataataaccatatccaactgctataccaatacatgcagttgcccacatcccagcagctgtagtaagcccttttactccacctttattttttaaaattgctcctgcacctaaaaaaccaattccagataatacttgagcaggcattcttgctgggtcagcatttgtatacaaattataatcaaagaataattgaatcgaagttattgaaacaatacaagaacctattgcaattagtatatgtgtcctaaatcctgcaaactgtcttattttttctctctctaagcctattattcctcctattattagtgctaatagtaaccttattgctatctccttacttcctatatcaatcataatataaaaccctcctgacttaattacaacttatgtcctacagataatttacacatcagaaatactattttatatcttaatattattattaatatatgtaaaatatagccatctgttaatttttgatacaaaaaaacccacaactgtgggctatttgcttaggtacatgtatttatttattaatatatctattttcttacttgattctactaactcttcttgaaatatttctggatattctatgtatgtatttatctcttccctaactgcttcaatctcattttttaacgcttctaattcattgttcgccataataatcaccactattacaaatttgtatatttttatatacattttatcaaacaatattatattttgtcaatattatgtcaataaaacttactataaaaatgctttaatttaggtattgtatacctggatactaagcctacaaacataccagttactaatgatgccattaacataaatggtaagtaccctatagcaagtatattttctatgattaaacttgcaactattaattgacctatattatgccctattgcacctataatgcttatccctattagtgataaatcttttattttactcgctaaatacataaataaaagactcagataagctcctcctatactaaatagtagatatgataaagggcctgcaaatattgatgacaaaattaccctgatagtaacaattataacagtatctttgacacctaacaacattaatgaaattaaagttataatattgctcaaacccaattttgcccctggaaatataactataagaggatttggtatatatgtctctagtacatataaagctaaactataccctatcataagacctaaaaatgtcatttttctagttttcattaagttaactcctccaaattttatctatcatcttacattataatacaaaatatataaaaacacctaatttagactaaaatatttttaatctatttagaataaatattagttatttcaatgtgcaattacctctataaatcttgactttttgtatcatacttgttacaattttaatgataatgaatttcattaggaggtgttaataatgactgtttacgatttaaaaataggagaaaaaggatttattaatagtatagatggagatattaaattatctaaaagattgcttgcacttggatgtataaatagtactgaaatagaagttaaaaaggttgccccacttggagacccaattataattagatttagaggctttgaccttgcgattagaaaatctgatgctaaaaatatttctttacaataatagaggaggagctacccgtgattaatgtagcattattaggaaacccaaatgtcggtaaaactactgtttttaatctacttacaggttcaaatcaatatgtaggtaactggcctggtgttactatagaaaaaaaagaaggatttcttggaaaagagataaaggttgtcgatttacctggtatatatgcaatggatactttctcaaatgaagaaaaggtttctaaatcatatttagaaaatgaagatgttgatgtaatagtaaatgtagttgatgcttctaatttatcaagaaacctttacttaacaactcaacttatgcaatttaacaagcctatagttatattgcttaatatgttagacattgcagaatctaaaggagttaatatagatgccaaaaaattaagtgaagaacttggagtaattgttgttccaattatagcaaaaaagaaaaatggtgttgataggatagaagaagagattaagggagctacgcaaaaagcttttatatatcagaaaaactttggaagtgaaacagaaacatataaaaaattagaatccattttatcgagatgtacaaaaactacatatacacaaaagaaatctatcagtgataagatagacaatatagtcttgaatcctatattagcatatccgatatttattggtgtattgttcctcttatttaaatttacctttgactgggtcggaggaccactacaagagggatttgctagtcttatagaggcttatatttctgcacctgttagtgatatgttatctaactctagcccatggtttaaatcacttatagttgatggaataattggaggtgttggtggtactttaccattcttccctttaatatttacattattctttggtatatcgttgtttgaagatagtggatacatgtcaagaacagcatttttaatggataaagttatgagaaaggttggtctatctggtaaagcttttatacctatagttatgggtatgggatgttcttctccagctataatggcaactagaacattggaaagcgaaaaagatagaagagttacagctcttattgcaccacttatgacttgtggagcaaagctacctatatatgcactatttgtagctatattctttccacataatgctgctttagtaactacgtcactgtatttggtgggtatagttatggcaattgtagttgcattattcttaaataaaacagcctttaaaacagaggctgaaccatttatattagaattaccagaatatagaatccctactatagatgcacttattaaaaatacttggaataaatcaaaaggtttcttgataagagttgttactgtcatgtttgcaatgtcagtcgtaatttggggactttcttcattcaatgtttttggatatacagaagatataaatgtaagcttcttggctactctaggtcatattatatctcctatattcaaacctcttggttttgatgattggagaacttcagttgctattttaagtggtcttggagcaaaagaaatcgtagtaaactctttaaatatactatatggtaatctaactgttgtcttaccaacaatatttaatggagttactgcatatacattcttgatatttactgctttatatactccatgtatagctgcacttgcaactatgaaaaaagaatatggcaataaaatgatgtttacatcatttgcatatcaatttatactagcatggataatggcttttatagttaaaagcataggtggagtactatttatgggtaattcaataatggaagctttgataggtggaataattatagtccttgcactctttattctgtttaataaattcaagtctacaaaaaacggaaatgtctgtagtggatgttctatttgctctggatgtccaagtgctaattcttgctcaagtaaggaagacagcaataaaaaaagtaatacacactaatatataaatattttagtttaaaataagataaaagtgggtgtctcaaaattaactttttagttcatgaggcactcttttttatataaaatcaaatatattttcatcatttcaacagtcaaaaagaggcttatctctattttgagacaacctctttttttgttacttattcagtttcttgctacctaacttcatgtggaacctagtatcttttggaacacttgggtctacgcctcttaatgtaggtatttccccacatattagttgtataggtactataaaattaaatgtttgatagtaaggattatctgtgatatcaatctttaaatttttatcattttctgtaacatctctacctatagcaaatacattttccgtccaaccagaaagtacatcaatcatcttagttactctaggttcttttcctgtatctagtataaatatagtagaatcactatttatagcattatatataccgtgtataaactcttcaaactcatacccagttacaggtattctcattgtttccaataattttaatgctgcttctaatgtatctccatatatatcagagtgacctattattcttatttctttagaattaactaacttttctttgtttctttcaatccattgtttagagagcttatacactgcttcaaatctattaattgcatctaatatcttatttatttcctcattgtacttttcactagatattgtacctttttctctagctatttgaagacctaataacattaagtttaactttgtacaataatatccttttgttttagctccagatttttcttcaccacaatttactgttaatatataatcagaaatctcatctattaaagcattcttacaacctgccatagatgctattttacaacccttatcttcagctaacttcatagcgttgtatgtagaataactactcccaccttgagatacacctactactagggtattttcattatcaaacttgaatgtatcttcagttatcataaatggatacattttcacaacatctatatctaataaattttgtaaatatggttgcacttgcactcctgagtgatagctagtacctgaacctgttattataatcttttttagatttgctctcttaacttcattaaataagctatctgcattagatataatttctctcattctaactggtgtttctaacatataatcttgtattgtcattttatacaccttccttatctatatattcaataaattataattaatttctataacaaacctatagcatgtaaagcgattcctgttactatagtgcctatagttaattttgttacacttacctttctcttcaacatgtaatatattaaaaatgcaaaggttaaaggtaacatattaggtattattttatctagtatatcttgtaaaattacttctgcaccatttaagttaaatttcaaaggagtagttatactcaacatagttgcaaccattcctcctacaacgaataaaccgacagttgtagccatagacattatcttctccataagtccctctctttgtattctttcaagagaatttacccctactttataaccatacttaagtccaaatattctaagggcaaatgctggtatattgtataataataagaataatagtggtccaaagatattgccttcttttgcaagtgatactcctactcctgctgctataatcctaaatgttccccagaataatgaatcaccaattcctgcaagaggtcccataagagctgttttaacagcactaattgaactttcatcaaattctggattattagcattttcttcttccatagctgctgttatacctaatatagcaggaactaccactgtcgttgtattaaaaatctctaaatgcctttctattgcttttgcttgattttctttcttattatatagcttctttattgcaggtaacattgaataacaataacctaagttttgcattctttcgtaattaaatgcaccttgaagagcaaatgaacgccaaaacatacttcttaattctttttttgttaatttattcaaagtcaatctctccttccgttaaagtattcattgctaattgaggattttgattattttctttgttattgatataaaagtttagtacaaatgctacacatactccaaataaagctatagcagttatatctaatccaccataagatgctaacaaaaaccctataaagaaaaatacagacatcttttttgaaatcaacatatccataagcaacgcaaaacctactgctggcaacaatgttcctgcaacacccaatccgtctaatataactttaggtattgcatttatcaatgttgtaactttatcagcaccaatcataattgctaaaaaggttggaactgatgtacttaaaaagaataatattactggcaaccacatcattatggtaactttcttaaaatcagcctgtttagcatagaaaactgccttttgagaaaagtacgaatttattattctaactaatactccaagagattgtgctaatactgctactggcactgccactgctaaagcaacttctgcaccattacctgataatatagcaaaagctgtacccaatacacctcctgttactacgtctggaggagtagctgcacctatccctgcaattcccatccaaattaattcaagctgtgcaccaatcataattcctgattttatgtctcctaaaactaatccaactaacatacctgtaactattggcctatcaaacatagattgaccaaatatacgcccatctagtataccaactcctgctataatagctaacatagtagcttgtactaacatattgaacctccattttaacttagtttaatttacattaaattacattacatttttgattttatttcgattttctaataactcatttacataaacaattccattttttgcttcctctaagcctgatttaactattagttttgtatcctcctcaactaataagaatatagataaaagcattggtaaatttacgcctgtcaacaattcaaatttgaacccttgcaaaagtaagtttgtacatatatttgccacacttccaccaaacacatctgttaaaacaacaaattcttcactatctttattatttgataatatacttctaatttctttctcagcatcatctgctgatttatcttttgtcatacaaaaatactcaatattagctaatgaaccaattattaatttacttgtgtcaacaagttctctagacaattctccatgtgttgcaattagaaattttttcattctctttctcctaaattattttattaaatctgatagttgtttctttttgtctctaggtaacattctaagttctatatcaattcctaaatcacctatttctttaaagttatttatatcatcatcatcaacagcaactaaatctgtaagtttcttttttccttcttcatatcttaaccctcctacatttatttcttttaatactcctcctgaatttttagctacaactaaagcatctctggtattttttactaacactaatacattgcttttctttgaagaagcaaatttttctactatttctccagattcctctaccccccttatatataaagttacattgctaggtttcgctaaattcagtgacatagctttcatttggtcattttttgcttcatcatttgcaactagtattacatttatacctagtgatgttgcccatccatatgcaacctgaccatgtatcaatctgtcatcaattctcatcaaagataccattttccccaaatcctccatcatacattaaaatttttattgtttatactctcatttatctataaaagcaaaaagtatgccaaatactggcatactattttaaatttcatttacttattttgtaatcttgtattttactgtggtagaccatagataatattataaatatatcctatctctgaaattggtatttgcacactataactcttttctagcacactaaatgcattttttattagttttacttcactatgatggtttttgattaacaaatccatatcagtatactcttcaatttcagtttgtctaactaatctttcaatcatacaacttaaatgaacatataaagaaatctttttatcatttggaagttttttcttttgaatattttctatagcattgattccttcttctattctctctattatcttttttgaatctaaaatagttagactgtctattactctaattaatgaaaaattctttacaatagaatcatttatgttctttattttttcattttctactactctactaaatattctaaaaacatcatcttctccttttcctgatattatatcctctaacaatataaaatccaccccattcacatttggattagcagttcctactatagccatcacatcatacatttcaaaaactggttctttatctcccatagaaacaagactatcataatcataaggtattattttgacatcaactatcccaattaaactttcggaaagtagatgttggatttttatagcagtacctatccctgtaaaacaagatgatattatagcatattctttatttttttgaggataatacaattgtatattaggtttagtttcttcatccataatttctgcaatctgttcaatgtttttaccttgcattaataaatttcctacttctagtgcagaaatagtggatatttggtctataaataacattggcccatttatcttattttttaaatcttcatagataagattaagagagcccatatcaaataacacaattaaaccattctttatcctatctccttctaggtatctagacatttgttttgatacatcagcaatggtagcatctataggcatatcaatagctgtaaatatatttttacccaacatccgattacatacattcgccatactactggcagtagcatatccatgtgctataatagtcgcattaacttgattaaatttcattcttataattgttgatttaataaatataatcattatgattgtatctacattattaagatacatatccaatctattcgttattaatgttgatattttacttattatagagtattctttgtaactctctttttttaaatatattagtaatttactttctaaagctttatactcatcagataattgataagattcgtccttcaaataaagataagacgaaaatgccaatacattattcccatcgtattttatattgttattaacttctaaatttctaaatatatcctgcattatcgatattataagctccataagtacgttattattttcatcattatttgaaaagactaaattgtccattagtctaatcattagattagaactctttttactaaatatttcttttgttatttcatttttttctagtctatcaaagtagtctaaacattttatgaaactttgatagattatatttcttttatttcttccatttgacatttcaatactaaattgtttaggagaaaagataatgcttttgcttttaccactttggaattgaaatatatctacattttctatataaagatttctagggaggtcttgaagagtaacaaaaatatttccatttcttctttgattttttgcataagctcgtccacatgcatattttattacatttttacattcacctatattccccttgaattttatctttaaaatcgtatttaatgtaatttgagttatctctataggcaagccaagtaccttactttcttcataaataaaatgttctacaatctttcttttttcaatagtccctctttcttctatattgggaacataaatatttatgggtattcttcttaaaaaagtttgcaaaaatttggatagactttctgttgttgcaaatattaatcttaccctagcttttctaattactccattctctccaatcctagaaaacgtacctgtatccataaatgtaaataacttttcctgaccttcactatttaatctatgtacttcatctaaaaataaaacaccaccatctgattgttctattagacctgctctagattcatttgctccagtatatgctccttttacatgcccaaataatagactagacaataactccaaattattataatactgcgcacagtttaacacattgtatggagaatttttttctaatacattactgcttacactatatttgtatattatcttggctaaaaaagtttttcctactccactttcacctgtcagcattattgtaagtccgccatttggataaagtacagcggtttttatttgttcgattacttcttttaagctattatcatatcctatgatactattaaacacagtctcttgctttaataatttacactcatttttaagttcatctaaattttcataaatacttttttttgtaggtcctactacatcatttattttatttttaggtaaaaaaataacaggtctactgtttatctttataagattatcagattttactaaatcatttaataatctacttgattgagttctacttaaattaaacttttttactatatcttctgttattatgccactttcttttttaagttcatcaaagttgttaaataatacacattcatttacaaaacttaaaatttcatccctcatgttcaacctccaatacaaatatcaataatactataatattagtatatcatttatatatttatgaaaaagataattatattcctatcttgattctcttttgtaaggttgtaaaatcaaactttttataagtataaaatctagattttttaacataatctcaaggttcttatctttccatatatctgacatagaatttatataagaatatatttattgtatttattataataaaaagtaaaacattataggtattttaaaacttattagcgaagaaaatatttgtaacttttattaccttatgaatattatttcaaatttaaaaaggctataaataaatttatttttaaataaatctacttataacctcacaataatacttataaattttattttttcacaatgatatatctcaaatatagttaaaaatatatctatttaattattaatatttaagtaataaattctcactcaatcattaaattcctttttatagtaaattactcttattttacttataccaaatacatttatgtatagatataaataagtactaaaaaaacaattcaagaaaccatatagtaaacttaattacatctgttatttgctcatatctttagacttatctatacaagcaacaatagattttataactgctgctctaaagccttcttcttctaataccttaacagcttctatagtagttcctgctggagaacaaaccatatcttttaattcacctggatgttttccagtttcaagaaccatcttagctgaccccattactgcttgagatgcaaatttataagcttgttgtcttggcattccagctaatactgctgcatctgccatagcttctataaacataaatacatatgcaggagaagaaccactaatacctgtaactgtatccattaaatattctgatactatttctgcctcaccaaaagattcaaacagagccttaatcatatttaactcttcatctgttacattactatttttacaaagagctgacattccctcgccaacaagggctggagtattaggcattactcttactatttttttatctgaacctataaaactttccagactttctatagttttacctgctgctatagatactattattttatttgcatctattaattctttaagtggagttaaagccttttcgcatatattaggtttaagtgctactattaccacatcagaatttgtaacagctacctttgaatcagttgtagtatttattccaaattcttcttttactttatctaaggcaacttggcttaaatctgatacagttatatcttctgcctttactaatcctgactgtactatgccacctatcattgcacttcccatattccctgaaccaataaatcctaaagttttcatatcaaatctccttttttctattagttttattttaaagtagctaaattgactttattttaactgcttaaaattatcttatttttataaaatataaccttattataactataataaattattcttttgtatgtattacttactaatatgtgtatgatttactaaatataaatttaacgattttttcattaaacttaacgagctaacttcctatttagaaagttagctcataattaatctaaaattttaaaaatggaatcaaaccatttatactttattatatcagttacgattttatatagtaagaagttttatttacaagcaaacctagaatgtttgctcagttcttcctattatctcatcttgtagtgttctacttaaattattgaaatggtcactatatcctgcaactctaactattaagtctttataatccttaggattcttttgagcctctaacagtacatttttatcaaatacattaaattgtatatgatgaccatccatattaaagtatgctcttactagattagccatattatctaaccctttttctccttgaactactgatggtgcaaatctttgatttaataatgttccaccagtttttatgtggtccatcttagcacaagattttataactgctgtaggtccattagtatctccacctttttcaggtgaaattccctctgaaactggttttgcacaaagtctaccatttggacttgctcccataatttctccaaagtatatatgacaagttgttggtaacatatctactctgtattctccaccacaaacagttagtctaccagttacctcattgtaatatgcattgaatatctcttgcattatttcatcagcataatcatcatcatttccatatttaggagtcttatttgaaactaaattaagtatagcttcatatccttcaaaattagcatcaagtgctttaagcaatgtatccatatcgaattttttcttatcaaatacattatattttattgctgttaaactatctgttatagttcctataccaacaccttgtatatatctagtgttgtatcttgctccacctctttggtaatccttgcctttttctatacaatcatcaactattgtagacataagtggacaaggcatgtgttttgcacatatattttctatcacagcatttccttctatttttatgtcaatcatataatgtaattgctttttaaatgcttcaaatagttcctcataagattggaaatttctagggtctccagtttcaatacctatttgttttttactaattgggtcatatccattatttaatgttaattcaagtatttttggaatgttcatatatccagttagaacatatgcttctttaccaaaacatccagtttcaacacaaccactggttccaccaagtcttgcatcttctatagtttttccagcttccataagctcttgaactattgcttcagtattataaaatgctggttgaccccatccttttcttgatatttcacaagctctctttaagaatttttgaggagtctttttacttatttgaacatttgaactaggttgtatcaatttcatttcatccataacatcaagtattatataactaacttcattaacaccatcttgaccatctggatttattccaccagtgtttatatttgcaaaatctgtatatgtgctactttcttttaatgttataccaacttttggtggtgctggctgattgttaaatttaacccataaacattcaagtaattcttgtgctctatctctatctagtattccattttctacatctctttcatagaaaggatttagatgttggtcaagtcttcctggagtaaaagcatcccatatattaagttcagtagtaacccctatatgaacaaaccaatacatttgtatagcttgatgataagtttctggtttgtgagctggtacaacatcacaagtttcagcaattagtaataaatcttttttcttagcttcatctgtttcttcttctgccatttgtcttgctttctcagcatatcttttacctaatataaccattgcatcacaagctattgccatagcttctaaatctgcttttttattatatgcatctaaatcattaagaaaatctagctcttttaatcttgcttctatgtctttctttaaatctaaaaatccttttttatatattgtatctccacaaactgtatgtcctggggctctttgttccataaactctgtaaacatacctgcttcatatgctgctaaccactcaggtgtcattgcatttattatcttatctcttgtttgtctttttttccaaaaaggaattatttcttctttatgtatttttctagcttcttctgatacgctaaaatttattatatctctattgtgcattacttctaaatcttccattgtgtgacaacaaatttctggatatgttggtgctccattaggagaatcacctttttcacctactattaattctccatcatttatgctaagagttctattctcaatataatgcttaaatgataaagcacgaagtacaggaatctctacacttccctcatattttttataagcttctgtcataagtactgctctttcaatagatatgtgtggttctgcattaatactttcttctcttaattttttagttctctcaaaagttcctcttgccattttattaccctccaatcttagtattgaaattacttgcttcaaacagtctttttatttcctctaatttttcttctgatggtctttgtagttcttctccttcatactttttataaattttatcatacttgtgtttaccaatattatgatatggaagaagacttactgcttgtatattcaaaggctttaaaaactctatcatttttttaacctctaaattttcatcatctacatttactcctacaattaatggtattcttatatttatgttaacccctaattcacttaaaatcttaacatttttcagtattaagtcatttgattttcctgtaaattttatgtgcttatcctcatcaataagcttaatatcatataaaaacaaatctgcacatttagcaactctttcataattttctgactttgcatagccacatgtatcaattgctacatggattccctttgatttgcacatgtttattactccacaaatgaagtccatatcttgagccattacttctccacctgatagtgttactccaccacccgattcttcatagaaaattctatccttctctatctctttaaccaagtctcttacagaatactcttgaccaacaatctctcttgcattgtttacacaatagtctaagcaagtttcacaaaactcacacttatcttggtctaagcatatttttgtttcacctttgtaaattgccttatgagggcatatatttatacatgcttcacattttgaacatctttcttcattatacaaaacttgttttgtatatgtttgactctctggattatgacaccaaacacattcaagtggacaccctttaaaaaatactgtacttcttatccctggtccatcatgtatgctacatttttgtaagtttataactaatggattcatgatttttcacccctaaataatatccattccattttttcatttttatgcaattcatcttcatagaatatacctatgaaaagcatttctacaattacataatactatatttgttattattttgtctatatatttttagtaatattaaaaaattttattttattatgatatttatattgtttttgtaaattaaatttaaatatttattaaatttatttttataagaaaatatagcaataaactataaacaatacatcattttaattaatttagatgtatatactataaaaattaaataaaaatagagactacactttaccatgtagtctccttctttctggtcatatttagaaattcacatttattgttactgcttttccgcctctatttactgttatttttgtactagcaccttttgagaaagtatacaactttttatttaaatcattcatacctgttatatctgtatctcctactttagttataatatcccctacctttactccagctttttctgctgatgaaccagatattacttctgcaacataaacacctttatcagtacttaattttgtacctgttgctgcttcataatttgatacatctgtaccttttatgcctaaagttactttttcatattttccatttttgattacttcttcaactatactcttagctgtattgattggtattgcaaatcctaatccttctgcttgagaagcttttgctgtgtttataccaattacttgacctttttgatttaacaatggtcctccactatttcctgcatttatacttgcatcagtttgtaataaaccagtcatattagttttttctgtttgtatagttctatctaatccacttattatcccttgagtaactgttttttgaaaatctaatccaagaggattacctattgctattgatatatctccaacttttactttgtcactatcagcaaattctgctggtgttagtccagttttatcaaccttaactatagctaaatcaagttgttggtcaaaccatactactttacctgaagttgttgaaccatcattgaataatacatttacacttgtagcttgaccatctgatataacatgagaattagtaagtatatatccatttgaatcaactatgattccagttcctacaccttgtgtttcagttggtattgcaaacatattactagtatcaacactagttgttgtaatacctacaacagatggcgtagctttttctgcaactgcttgataaatattttgactcttaccatcatcatttacaactatcggcgtagaacttcctgtagatttgcttactaaattgtccttaactaaaattattgttagaaaactactaagtattgaacttattatagcaactaatattactaaacttatccctttctttcttcttgacatctcataccactccctatcttaatataatataaattatcaaaatatatttttcccaatttttcataaaaaaaatgaaatcatctattttgagtaaactccttttcgatgatttcattatattattttaatcttaattaaaccttaactatttaaaattatttaagtcttttttctagctcttccttttctttttcataacctggtttgcctagtaaagcaaacatatttttcttgtaagcttctactcctggttggtcaaatggattaactcccaataaatatccacttattccacaagccttctcaaagaaataaactaaatatccaaaattatactcatctagttgaggtatatttattactaaattaggtacttttccatctgtatgagccaatagagttccttcaaaagctttatgatttacaaaatctacagtcttacctgctaaataatttaaaccatctaagtctacttcctctgaacttatagttatatttctcttacagttttcaacattaagtactgtctcaaataaaagcctttttccatcttgtatgtattgacccatagaatgtaaatctgttgagaaatctacagaagcagggaataaacctttattttcttttccttcactttctccataaagctgtttccaccactcacttacataatgtagttgaggttcatagttcactaataactctacatcttttccttttctatgtaaaattgttctagcaacagcatatctataactatcattactttttaagtcaggattttgaaatgcttctctagcatcatttgcgcctttcatcatagcatcaatatcaagtccagcagcagcaataggaagtaacccaactgctgtcaatacagaaaaacgaccacctacatcatctggtattacaaaagtctcatatccttcttctgtagctaactgtctaagtgcacctttacttgcatctgttgttgcataaattctctttcttgcttcttccttaccatactttttctctaagtaatctttaaatattctaaaagccagagctggttctgtagtagttcctgatttagatattacatttacagaaatatcctttccttcaattatatctaataaatccataatatatgttgagcttatattatgccctacaaaatatacttctggagcctttctttgctcttttttaagtccattcctaaaagaatgacttaccatatctatagcagctctcgaacctaaataagagcctcctatacctattaccagaagaacatctgagtctgattttatcttctcagcagatttttttattctgtcaaactcttctttatcataatttttaggaaggtctatccatcctaaaaaagtatttcctaaaccagttttattatgtaacatgtcgtgcgcaacatctacatatggttgcatgacatctatttcgttttgacaaaaaaactctgtagctttactataatcaaaatttatttttcccatttaaatccctcttttcagcatattcgttttaaagagattataacacaaaatataggtgttttttttaaaagtttgccacaaaatcatacatatctcatcatttattatcaggaaatcgattcttctaaatactataactatgtataaatttaaaaattttagtcaaataaatttacaaaaaaagaaactctaaacgtatcatttaaagtttctcttttatttatcctctattttaaattttatattattttaaattaattatttttaatcatttcctaatctcttcgctataacttgttgtgctatattgacagcatggtcagatattctctctaaattacttattacgtctaaataaataactccattttctatactacatagattattgttcaatctatacatgtgattagctctacaagatttctccattatatcaacttgttcttcaatttttataaccttacaagctaaatcaacattatcagttctcattgattctaatgcataagtatatgctgaaacaactctattatacataacatcaagttcagattgtccttcttctgagaaagaaatatttgaatctattgcaacttgcgataattcagctatatttttagcgtggtcaccaattctttctatatcattgactgtattaaacaaagtatccacaacttctcttgaatcatcatctaaaggtgcttttgaaagtttaagtaagtaatttaaaatagctttctgtaaatcattgattaatctctctcgtctatatgtcttagctattttttcagttgaatgttctactaaggcttccatagatgcatttaggctttccttcgccttctcacccatacgaagtgcttcttttatcgtatttgcaagagctatagaaggagtttctatcattctatcatctatatatttaatagttttagtttcatcttcatctatatcacctgctctatcaggaacaagctttatagctagttttataataagatttgtaaatggtaaaagtatcaatacagatattatattaaacaatgtatgtgtattggctatttgtcttgcaacattgcttggatcccaacttgtaaccatgcttactactggtttattcaagaatattaagaatatcaccgttcctaaaacattgaagattagatgcatcatagctgctcttcgtgcatttttgttagcaccaatacttgataacagtgaagttacacatgtaccaatattttggccataaagaattggcagtgctgctgataatggcactagaccttctgctgccagtgcaaccaacatacccatagatgcacttgaactttgtattattgctgtaatcccaaatcccaataataatccaagtagtggatatctaccaaatgtaacaagtaggtcagtaaatccttgatagtctcttagtggctccactgccatcttcataaaatccatacctgtaaataatataccaaaacctataagtatttcggctatattttttattctaggcttatttccaaataaataaagtataatacctacacctaatgctactggggccataccagttaagtcgaaagataccaattgggctgtaacagtagtccctatattagcacccattataactcctattgcctgttttaaagtcattattcctgcatttacgaaaccaacaaccattacagtagtagcacttgaactttgtattactgctgtaactcctgtacctaccaaaactcccataaataggttactagtaagtagttttattatcttttttagctttgtcccagcagatttttgaagaccttctcccataaggttcataccatataagaacagacctaatccacccattagacttattataatgttcaaattatttcctccttgtaaagagattactgtatctaaaaattttataacctattgtattttatcaaattataggagtgataatgttaaattcatgttaaatattaaaaaatcattaagtttatgttaaatttttgtattattggtgtatttttgtattattttttctgcacattttataccatcaactgctgctgtaactataccacctgcatatccagcgccttcaccacatggatatagattcttaatactcactgattctaaagtattttcatctcttactattcttattggtgatgatgacctagtttctactcccgtcaaaacagcatcatacattgcaaacccattcaattttttatcaagagatataaacgcttctctcatagtctctgttacgaagctaggcaaacattcacttaaatttgtaagtgtatatcctggtctatatgatggctcaacacttcctaaattcaaagaagtcttattgtttataaaatctccaacaagctgaactggtgcattgtaattttttccacctaattcaaaagctaatttttcatacttctgctggaaatgaacacctgctagtggattatcactcttaaaatcttctggcgttacatttactaaaaatgcactatttgcatttattttatctcttgcatgttcactcataccatttgtaactatttcaaaatcatttgatgcagatgctatgacactacctcctggacacatacaaaaagtatatgctgttcttccatttgaaacatgctctataagtctataatctgcagctcctaacctaggatgattataaaaatccttgtactgtgctttatttattaaatcttgtggatgttcaactctagctcctattgcaaaaggtttttgaactatttttatacctcttgaatacaacatttcataagtatctcttgcactatgtccaacagctagtataattgtatctgtatctattttttcagtatcatttattattacagattgtatagaatcatttgatacaactatatctgttacttttgaattaaatctaacttgaccacctaaacttattatttcatttcttatatttttaactacattttttaatatatctgttccaacatgtggcttatgtgagtataatatttcatctggtgctccaaactgaactaactcttctaatacttttctacatcgtatatcttttattctagttgtaagtttaccatccgaaaaagttcctgctccaccttctccaaattgaacgtttgaattattttttaattttctagttgtccaaaaatcacttatatctttggttctactgtctacatcaagacctctttcaagtatgattggttcataacccatttgagctaaaagcagacctgcaaataaaccagctggtccactaccaattaccaaaggattattctttaattttttatcacccacaggtacatttatgtatctgatttcctttatttttgttacatcttttatttttgagttaagtattttattttcatctttgacttctacatctacagaataaacaaattccatttttcctttttttctagcatctatagattctttatatatactatatttgactaagtttttttcttttatttttagcttcttaagtacaacatcttttaataaagatatatctttatcaattccaagttttacattagatactcttaacatattgttttcctctcttagattgtaatataaaaaagctagggttattcctagctttctacaaatataacttctatattctcttttactagattttctacccaaatctcatctagcacaaaattctttattttgtttacaacaagtgttttatctaaatcctttttcaagttttttactaagaccattgcttcaactgatttatgcaatctttcaacatacagagaattaactttaatcaatacaacccttaattcacacacatataacttttcactacctaaggtgatttcatcatcatattcatatacactaaattcatatgtattttcataaggtgttatattttctattcctatatagtccatttatttatccttttttagttataagacctcttataaccttcatgttattaaacaccttttctaagaagttctctgcttcttcattgtctaaaaggtttatttcaaggttttcgttttctacaatacctttagatttacagtactctttagcaacatttattagttcattttttttatccatagataaatcaaactctttatagtctattattatatattgtttggtatcaggtgatacaccattattatatcctatttctatatgataaataactgcatatatttcttctccgttgtacacaggtacagctgggttagattttataaagttcgttgatacagcaattgcatttcctaaactaagactcattattaatacctctttctaaacattatacatatattatactatagattctttatctatgacttaaagctttttataattaattaagatatttttaaatctttgtatctctttcctagtgtactagagcttatatcgtatttctttgatatttgaacttgagttataggttgtcctgcttcttttttaacatagtattcaacagcagctgcccaaccattttcagctccttttatattttcatgatttttcttatattcattccaaaactctatacatgcatctatattttctttttctacattttctttaagagtatctaaaactttacattcttcttcagctaattcattttctgaattaacttttgtatcgtttttatctctttctctctttaaatattcagctatacttgggtctaaaagctgttgtatatacttgtatagtatatgtgtatgataaattaagaacgacttcatatctttgtatacatcttgatattgattgaatagattcataatatcctttaaaattatatctttaacctcatttgatatacttatagttatatctatcaatatgttagttccttcaatatcaactattctagctatcatacaacttccgattttaaaacttctcagaagttttacatcttctgtacaaagttcatttccacttaaacagtcctttaatactatttttccagcagaaacttcttttacctcataaatacttacgtatgattcaaacatactttttaatattgatacttctgattgacttaggtttgcaccattttcttcaagaaaaccaactgtcataacctttttattttccattatgtggtcttgtattaaataagtattaaaaaatctttcaaatttttcatttacactatcattttgcattatataaaacatttctttagctttttcacattcttctttaaacttatcctgtcttgaataatcatataactttgaatataaatctgtatattgtttttgtgaaagttcagtttttctgcatgctctttctgaaacaatatctttatttaaacaacatttcttgtattttttgccacttccacaagggcatagctcatttctccctaacaatatgacttccactcccttattattaaattaaagtacaatttgttattataccatttttttattaatcaatctatagtataagtaaatattctattaaattcacttatattttggtacaatatattaactttaattaggatttcgataaaatcatcaacaatccctcttgtagaaatgaattatcgtaaaactaattcctctataaaattttattaattgataatagttttttactttatctattcttttttgttatatgactctaactgtcattttacattcaacaatattgtctttttcttgtttatattcatttggaatattttgaacatcaaaattattgacttttaatttgttaatttctatcttttcaagtttattatttagtcttaacttcttcattacaccttcaagtttcaacacatttgcaagttctccattaacttttatttctaaattaacttgttttttattgtgattatctaaactactttcttgattaatatattctacattcacaatatctctcagttcattttctactaataacactatatctttatttgtttttttatctaaaaatgagttattaaaattatttttcaattcttcatttttatttaattcaacactttctatatatttatcatctatatgcttattatcctttatttgataattatcttgattatttattttatttattatattttgcttttcattcttcaaactagttaggttttcttccaaataacttactgctatatcacttgccaatataataactaatattaacaatattttaagtagatttttttctctattatttaatctcaaaaataatcacctatctaactttttattctaaatctataatattctccatctcttacaatactgtctatgtaataatattttatgtactttattttccttaggttgtttaaaacatctaaatcactacacacaccttccatctctagcttatttttatctatcgatattttagtaatactatttattccaattgtttcatatattttttttatttcattaagttttattttagaaaatttctctctagttttatctgttgttggtaaagtgtgctttgatttatccactagcttattttgatttatataatcttcaagttcatttatagatttcacatacataaatgatttaaataaaatacacgttaaaattaagactattattattttatagattttattacatggtttagtttttttaaatccattaagaaaatttattgttttatccactttcacttaaataatcattcctatactatttatataatttatcctattgtcttctaaatctgcatcaaaattattttctacttttactttatcttttaatcttaatggatttacttcaatagatttatctgtatatttaaagtattcttcaataaaacaattttctataccatagtaataaacatacttaaaatcccttaataatctttttatgaactcatatgattttccctcttttgatagcaagtatgtttctcttatttttttatcttttgttatatttataattaactgactttttttacattctataaataccccttcttctgaaaaattctctattaaatttaagtttataagcttttgtaatatatcaaaatttatatttatagtctttggattcatatttagattttctgaaatgttcttaattaattgaataatactctttgggaaaagaattacttgtatattcaatttatcatttttagaatttataactttatattttattgaatagttatttatgtttattggaatgtattgtgttatttcaaattcaatcatgcttaatatgtctctttttttcttagtatttagaacttcaacatttctaatgactatatcttgaatttgaatgttaaagtataaatttttatataatatttttgatttaccaatctcctcttttacaaatctaactacatcttctatatatttaatcttctcaatcgaattactatcattttttatatcaaagttaatctcttttataattgatttatctataaaaacttttttatgactttttcttaaaaatacaagccttatataatcatcatttatttctaagtttagaatttttttaattatagccatctccttcttaaataaaaataattttaaaacttacagcaatcaatataaaatattattttggataaaattgtttagaatttatatttacgcttatatctgttccgctatcatttatgacaagttcgaatttacctgatgtactctgaggaactggaacagtatttaggtatcccttttccttcaatgtttctacacttagagagtctattgtcttttcatcatcattaattgccatgctagctgcagttactatattagcagcattcgtatagtctgcatttaatttggcactttcttgaaccttactatacttaactaatgctatactagatataacgcctaaaatagttactactacaatcatttcaacaagtgtaaatccttttcgttttttatttatcaaatttatcaattaaatattctctccttttcaaaagtttcatctaataaaatttatttttctctctaaaaattagtaattgcatcaaacataggaacaaccattgctaaaataaaagtgccaataattaatcccataaatacaattagcataggttctataaatttcattatttgctctattttgttatttaattcattttcataaaatttatttattacatttagacttttatctagtttcccactttcttctcctgtatttgccattgaaataaataattttggaaaaacatttgctaaattcaaagatttacctatgctatttcctttttttatataattattagaaatctttaacctttcataaataaattcgttgtctataacactagctgacatgtctatagcttccacaatttgtattccactgctaattaaaacggacaatgcccttgaaaatcttgttgtagctactaactgattaattttttttataaaaggtattttgaattttaacgaattaatcaatttttttatattatcatttgttataaagaaataaatgcttcctattgaaaacaatataaaactaaatattatataagctaagttatttgtaaccactgtagatattcccattaaaactctagttattaaaggtggttcaattccattgttggtaaaaaccacctgaaaattaggtattacaaatacgaatataaacaacattgataagatagataatattataagtattattggatatattgaaatagttattattttcatttttaatttgtattctttatcataataattagataaatcactcattattatatctaagtttccactagtttctcctgcttttatcatacttataaagaatttagaaaatatacctgttatttgaaatgattctgctattgagttacctttttgaatatgatttgatactatactaagcaaattctttacttttttacttgactgactctcaatgatttcaaatatttttgtaatttcacatccagattccagcaatatgcctatctctttgcaaattactctaatttctttatcactgattctatttaatactaaataaaacttttctaaattataaaatatatttttagataatctcatgtactataataccttccaaattatattaattacaattaaataaacttaatattttctaatttaatgcatttaattttatttcacttaaatataatttatactcaaacatcttaattaaaatagattaaataaagacaactgaccaaacgaagtttaactatacaattcagttaaatcatttcatttactactaaacactcttctaatgtcgttattttttcatttattagtcttttacagctatcttcaaatgttatcattccattattttgtgccacatctttaatagtactagaatcctccatatttcttatacatgtctttatatcatcattaatttctaagatttcataaattgctgttcttccaaagtatcctttatcattacatttttcacaccctacagctaccttagtatttacatctccactaaaattatcttttatcataatctcatggctacaatgattacaaacttttctaaccaacttttgagatataacacctataagagaggcatttaaaagatatggtggtatttgcatttctagtaatctagctatggaagatactgcatcattagtatgtaaagtacttataactaaatgacctgttatagctgctcttactgctatcttagctgtttctgcatctcttatttctccgaccattattatatctgggtcttgtcttaatatcgctctaagacctacatcaaagctcaaccctacttttgaatttacttgaatctgacttatgccatccatcttatactctacaggattttctatagtcataatatttttatttattccttttaaatcatttaataaggaatatactgttgtagtctttccactacctgtaggacctgtcactaataatactcctgctcttttatttattatacgatttatagattttatagcttcctctgaaaaaccaagttctaatttgtcttttaaaaaagtatctctattaagtatcctcaaaactattttttcaccatagacagttggtattgatgaaactctaatgtcaattaaatttccacctaactttatatccaccctaccatcctgaggaagccttttttctgttatatccattgatgcctttaattttataaccgtagacaatgatggatagacatcaactaaaaactttgatacttcctttagttctccatctaccctcattctcactattaaatgttctttaaatggttctatatgtatatcacttgcattttcttttatagctttttctaaaagattttcaaataatttttttgcataatcctcatcaagttcaaagctattataatatttttcaatcttttcacttataagttcttttttctccttcttcaatataatttctttacctgtagctaatctcaagtcctgtagagcataaatatcctcatcttctatttctacaactaaattatcatcttgaaactcaactggaaatacattatatttctttgcaagtttttctggtattaacattggcaaactgctttcctctaatataatattaatcaccctttatatactttaatttattaggtatattcatttttttcatagagatattttcttcagtttttatgcttattttcattggataattggtttgtatgctatctaaatatttactacctttatctacataattagataatttctccttatctccaatgcactttatttcatatggttgtgctacaggaactccatttatatttatatggcttcctgcaagtacaacttctgaatattgattaattctttgaccatttatttctatgtattttcctccgtttacttttaattcatttataacttttacaagaatcttattatagtctatactattagctatattccctgttttttcatctatagcatctatacttaatattatcccactaccctttacatctgaatatgatagactatctctaagtgtttctatttctgatatttcttcagaatttttttgattttgtttcattgaattaatttctttatctaacttgtctttctctttggttaattcttttatagattttcttgtcatttttatttcttttcttattgacttgtctttgcttgtataaactgtttcttcattgctataatctctaaatatggttccaacaagtatacctaaaatagtacttgctagtattataaacacatattgttttttcatactgtattgctccttacaaatttatttttatatgataattttctttaattaaatattaaacatttacatatgcttattatatcaaagttatatattaaaattcatctttagtatataatatcatacattgaactcctatcactaatttaccaatatcaagtatgcatttttagatgttcttaaaattatataaactttcaataaacattgttgtgatattataaaaaaacataaattaggaaaggaaataataattatgaaaaacaaataatggctttggagattattaatatcattttttagcaaaaaaaagtaaaatggcatagcctcaaagctacaccaatttactaaaaattatattattattaacattaattttaaacatatacgtttataagttttcctcatattttaaaattcttttaattaacttatctcttaatttccctacttcatcaaatctcatattaggactatagtaactttctataatatcatgtttagacttggctctcttaagatttagtactgcccaacaaattaaatcatctaaaactttttcatcaaatttaatatcttcttcatatttaagtagtttttctctatttaaaaactgatttaaatcaattgtatcttcttctttaaaagtcgtacttatagttatgcctatatctaaatcagttaatagtacagtttcaattttctctggaataagtggataatgataaacttctacatttaaacctttttcagtagctttcttatatactttgtttaataatgtagttttcccagttcctatttctccatctaaataatagactttctttacatcttttaaaatgttttctgtataatctaaacaccctacaggagttatagctgaaccaaataaatgcttttctctttttagatttcctgtgcttttaactccatcaaataacctttttataaattcttctgtgaccaaatttactttgccataatccatacaatcagaatatttttcttctatgtctctaaaaattggttctgctgactttaaaaacttaaatgctcttttaaatgaattactaatatctttatcataaactgatatttcttgtttattcttttctaattcttctgtattccagtaatcacctaaattaattatctcatccaaagctccaggtagctttgggtccatagtatgtggggcagttgcatccataagtaccacgcctaatttctttataactaaaccatccaacgaacttgggtcagaaggacaatgatataaatcaatatcatatcctctatgcaaaaactctttataaatttttttcataagtgaggattttcctactccaggtccaccctttaaacaaaaaactctttttacattttcaggaattatatagtcaaaaaaagaatatgagccttgtgatgtatttccacctgggaatgccttctttacctttccttccatattagcgcctcctcataatttacaatatctcttaattaagatattcatattataagaattttattacagctttctgattttgacaaatttaaaacttaccatctaatactaataacatattaattttatctaattattatagattctcatactgtaccttattctatctataaatacaatttaagtgtccatattgaaatatttgtattgtaatacagctggatattacttaaatccaattgtttccattataattttatgttaaaataatattacaaaatacatctgtttttcttcataaacgggtgaaattccctatcggcggtaaaagcccgcgagccttatggcataatttggtcatattccaaagccgacagtaaaatctggatggtagaagaaaatagtatatgagtacctttatgtaattttacatgagtaatctatacaaatccttcaactaccgtatttattcatgaaattagacacattcaaggtacctaatatacaggtgctttttttgttgtttattttacaattatatcgtacttataaaatctattaagattggagtgttatcatgaaacaaaaatggatagtattgattatcatctgtattggtgtatttatgtctactcttgatggaagtatactaaatatcgcaaatcctacaattgctgctgactttaaaattaacatgtcacaaattcagtgggttgtaacagcttatatgcttgttgtaacagctactatgttatttttcggaaaacttggtgataaagtaggttcaaatcgtctatacgcattaggattttttatatttacaataggttcttttctgtgtagtatgtcaaacaatttatcaacattaatttcttcaagaatctttcaggcagttggagcaagtattttaatggctactgggcttggtatagtttccaatgcatttccagcaaatgaaaaaggaaaagctataggaatcactggagctgtagttggtataggaaatatgagtggtcctgtaattggaggtataattttagaacattttggatggccttctatttttattatcaatatacctattggtattatagcagtctttcttggcattaaatttctgcctaaacctgttttggatgaacaaaacaagagctttgatatttcaggtcttctacttttcgcatcttgcactacgcttatattacttgcaatgaatgagaagggtaatacaagattgtatttaggtataacagcacttataatcttcttattgttggcattaagagaagtaaaatttgaacaaagctttattgacctacctctatttaaaaatagaaactttactgtaggcaatatcattggagtagcttgttattttcctcaaatggcagtatcttttctacttccattttatttagaacaattaaaaaatttatctcctatgatggctggttatgtaatgactgtacatccacttattatggtacttatagcacctattgcaggttcactttctgataaacacggtgcaaaaaacattctaacagcatctttttcatttatgaccatctcactagttggaatggcacttttaaaagcagattctccattgtatcttttaattgtatgtttagttatttttggacttgggctaggagcatttagttcaccaaacaatagtagtattttagcagatgttcctcctcaaaaacaggggtacggaggcagttttcttgcaactattcgtaatttatcatttgctcttggaacagcattttttagtagtttttttgcacaaagtcttacatacaatcaaaagtttaaaagtcacacatcagcctatgttatagctagcaatcagtcttattggattgcagcatcagtatgttttatagggcttatactaactgttttctttatgagaaaaacagataaatctatttcttaaatgctatttattgctgactacataagtcaataattttttagttgaactaatttatactaattttcccataccttactaaaatttattagtatttagcaaaattactgatatttattgtttataaacaataaggatgccaaaaaaagttcattaaaactattttaaggcatcctatattttgctttaatattaatataattaaaactaactattattacatttattattcaaataaatcttatgtcaatatttaacattttaaatttaatctactgttatttcatatccatgttgattgtattgatttacaatctcttcccataattcttcaacaccagtcttttttagtgaagaaacaggaattactttttcactactttccatttgcaatttttttcttattatacttatgtgtttttgatattgtcctctagatattttatctgccttagttgcaataactacacagttatatccaaagtgctttatccattcatacataagcttatcatctgctgtaggctcatgtctaatatctacaagtaggaatatagaacataactcttgtctactttctagatatctttccattatacctccccacttttctttttcagacttagctatctttgcatatccatagcctggaaggtctacaaaataaaattcattatttattagataaaaatttatagttctagtttttcctggtgtttgactggttctagcgaagtttcttctgttaagcaatgtatttattattgatgattttccaacatttgacctaccagccaatgctatctctgggattccttctgctggatactgtgatttattcacagcactcatagttatctctgaacttctaattttcattattttcaccactctttaataaagcttgttctaatacttcatccatatgttctacaagcacaaactccattttttcttttacattttctggtatttcatctaaatcagcttcacattctttaggaattaatacttttgttataccagctctatgagctgctaataacttttctttaacccctcctactgctaagactctacctcttaaagttatctctcctgtcattgctatatttccaggaacaggtcttttagtaagtgctgagattactgcaagagccatagttataccagctgatggtccatcttttggaacagcgccttctggaatgtgtatatgaatatcattcgtcttataaaattcagggtctatatcaaacttgtccactattgaccttatataagagatacctgtcttcgcagattccttcataacatctcctaattttccagttaatacaatttctcctttacctttaagtacgtttacttctacttcaagtgtaactccaccaactgctgtccatgcaagaccatttactaatcctatttgaggattaacttctgcaagttgatacttaaacatgtcttttccaagatatgtctctaggtcagacttatttataacaacctcttcaagagttgggtcttcaacgtattttttggcaacctttctacaaatcttaccaatagttctttctagtgttcttacaccagcttctcttgtataatggttaattatacttcttaaagtttcatcatctatttttataaagttttcttttaaagcatgttctttaatctgttttggaagtaggtattttcttgctatatttaatttttcttcttctatatacccagatacttctattacttccattctatctaataatggtcttggtatattacctagactatttgctgttgtaacaaatagtatttttgataaatcaaaaggtatttctaagtaatggtccacaaagtccttattttgctctgggtctaatacttctaacattgctgaagctgggtcacctttataatctgctgccatcttatctatctcatcaaataagaatacaggattttttgtttgggcttcttttaccccattaattattcttcctggaattgaacctacataagttcttctatgacctcttatttctgcttcatctctaactccacccaaagatattcttacaaattttctatttaatgctctggcgattgattttactatagatgtctttcctgttcctggaggaccaactagacatattataggccctttaagtgacttagcaagagttcttatagctagatactctagtattctctccttaactttttctaatccataatggtcttcatctaatatatcttttgccttagttatatctaatttatcttttgtctctttattccatggcaatgagaatatagtatctaaatagtttctacttacagatacatctggagacatagaagatatttttgaaaatttatctatctctttttctattttttctttggttgtcttaggtgcttttatttttttaagcttttctctatactcatctgcttcagaatttatatcttcttcttcacctaattctttctgtatagcttttaattgttctctaagataatattctttttgaaccttattcatctgtttttttactcttaaagttattttcttttctatttttaatatatctatttcctctaataatatagaataaataagttcaagtctttttctaatatcaaattcttctaatatttcttgtttttggcttgattttagatatatgtttgcagctatcgtatctataaatctatctacatcttctatatcagctagagatattaatatttctggtgataccctatttccaatatttatatactcttcaaaggcatcaaatacatttcttacaaatgcttcaatttcaacttctgtttcactatccaaattatcactattaaatactatttcttctattactgctctgaaatacccatcttcttgttctattttctttactctaccccttgatacaccttcaaccaaaacacgaactgtatctcctggtaattttatcatttgcttaactttacagattgttcccacatgataaaaatcctcttctcctggctcatctacctctgcttctttctgagaagttaaaaatataagttcttcatccatcatagcttggtctaaagctttaagagatatctctctacctatatcaaaatttaatatcatatatggaaatatagctaatcctcttagaggaattaatggtaattcatgatctattttagtataattttgttccatcaacattactccttttctagtctaattgctttgcttttaatattatatatttgaacaagttaattttcaacattaatgataaattcttagaatactatcatactatattatctttttattatgatataatattaatattagtatacttagatgttatttatcttttggaggtttctattatgttgaaattgtttttaacctttttaaaaattggtgcgtttacatttggtggtggatacgctatggttcctcttatacaagatgaacttgtaaacaaacaaaaacttttagagcaggaagaatttattgattatttatccatagctcaaagttatcctggagtactggcagttaatatatctgtattattaggatataaactttatggtataccaggagttcttatatgtaccttaggctctgctttaccatcattttgtatagtcttagtcttatcgtatctatactttaaaaattcatcatctaaaattttagatggattttttaaaggagttgcgcctgttgtaatagctcttatattgtattcttttacgagcatgttcaagaaactaccaaagtctaaaactaacatactactattaattatagcagttttatctgttggtgtattcaatataagccctatttatttaataattggaggaggtgtatatagtctatgtcagaaataatactactcttcttaatattccttaaaataggggcatttagttttggtggcggttatgccatgctaccatttatccagcaagaatttatatctaaatatcactttataactaatcaagagtttttggatttacttgctatatcacaatctacaccaggtcctgtagcaataaatagtgctacatttgtaggatttaagactgctggcttctttggttctctagctgcaactattggtgttacaatttttgcattaataggtctaactattatatcaaagttattttctaaatttaaaaataataaaaaggtagaaaacttattgacagttcttagaccaattactctaggattcatattatcagcagctttttcatctgccaaagaagttaattgggatttatatggaataattgcatttatagcatcattttatcttttatataaaggaaaaattggttccattgcaattgtattcgtctttggtattctaggtatattactcacatttttatgataatgatacctattttatatttagcatattaacataaaaaaaggagcttttaaagctccttttcatcatcttatgcactttcctcttgatccttaagtactatgataggatttactgagtcttcgttcacagatttctctgttactataaccttctttatattatctctagatggtacttcaaacatagtttccatcattacgctttcaactatacttctaagtcctctagctcctgtatttctttctatagcctttttagcgattgcacgaagagcaccttcttcaaattctagctcaacatcatctaactccaataactttttatactgttttactagagcatttttaggttcctgtaatatctgcattaatgcatcttcatccaacaactctaaagtagctaaaactggtattcttcctataaactctggtattataccatattttaataaatcctctggaagtactttttcatacagcttccctaaatctaattcttttttactttctattttagctccaaaacctagtgttttatctccaccacgtttttgaattatcttctctaatccatcaaaagctccacctaatataaataatacattagtagtatctatctttaaaaattcttgatggggatgttttcttcctccttgtggtggaacatttgcaacagtaccttctaatatttttagaagtgcttgttgaacaccttcaccactaacatctctagttatagatgggttttcagattttcttgcaatcttatctatctcatctatatatattatacctctttcagctttttctatatcaaaatcagcagcttgaataagttttaaaagtatattttcaacgtcttctccaacatatccagcttcagtcaatgatgtagcatctgccattgcaaaaggtacatttagagttcttgctagagtttgagcaagtaatgtctttccagaacctgtaggtcctaataaaagtatattactcttttgaatttctatatccttactactagattttttactgtatattctcttataatgattataaaccgcaactgataaagcttttttagctttttcttgacctattacataatcatttagaatctccatcatttcctttggttttggtaaagatgtagtatcttcatctatagtatcttctatttcttcctgaataatttcgtcacaaagttcaacacactcgtcacaaatatatacatttggacctgcaattaatcttcttacttgatcttgatttttaccgcagaatgaacactttaattgtcgtttttcttcatatttagacatattaacacctctctctatctacggtctctttgtaaatacttcatctattaaaccatattctttggcttctagtgcactcatgaagttatcacgttcagtatccattttaattttttctaatggctgaccagttctttcagataatatctcatttaaagtttcttttatttttaaaattctctttgcatgaatttctatatctgttgcttgaccttgagctccacctaatggttgatgtatcattatttcactatttggtagtgctagtctttttccttttgctcctgctgccaacaagaatgctcccatagaagcagccatacctatacatatagtacttacatctggtttgatgtattgcatagtatcatatatagccattccagaagttatacttcctcctggagaatttatatataaatgtatatctttgtctgggtcttcagcttctaaaaataatagctgtgctactataagccctgctgtggcatcgttaacttgatctcctaagaagattattctgtcttttaatagtctagaaaaaatatcataagatctttctcctcttcctgtttgttcaacaactacaggtactaatgccatggtttcataccccctttattctatataatttacagtagcttttttaagctactgtaaattattatacgcatttaactaaattatatttgcacatcattatatactaaacatttcataacgtcaactatattagttagcgtttattttattaagctattgttgcattatcaactaataaatctattgtttttcttatttttatttgaccttttatatcttctttgtcagcatctcttaaagaagcttctattttttctacttccatattgtaagcagaagccattttttctaactcagccttaaattcttcttctgttgcttcaattccttcagctttagttattgcttctaatactaaagaagacttaactaattttttagcatcttcttttctctcttctcttaattcttccatagttctaccagtcatctctagtaattgttgtaatccaaatccttgatattgtaattggtagttaagttcatttaacatattatctatttgatgttgtatcataacttctggtatttctatttctgtattttcagcaactttttctactactgaatttctagtttctgcatctgctctatttttagcttcttcttctaacttagctcttacatctgcttttaattcatctaaagaatcaaattcactagtatctttagcaaattcatcatcaagtgcagataattcttttacttttacatcatttatttttacattaaatacaactggttttccagctaaatcttgtgagtgatattcttctgggaaagtaacattaacttctacttcttcaccagcttttttacctactaattgttcttcaaatcctggtataaatgtgtttgaacctataactaagttataattttcacctttaccaccatcaaaagctacaccattttcaaaaccttcgaagtctattatagctgtatctccatcttctaaagctttgtcttctacacttactaatctggcatttttttcaaccatttcttgtagtttagcatcaacattttcgtcacttacagtattctcaaccttagctatttctatacccttgtagtttcctaattcaaactctggtttaacttctacattaagaaccataaccaacccattatctttacttatttcttctatatctaaatctggattgtctattgggtctatgtctaattccttgatagcttctggataaacttttgggaataatatttctatagcatcattgtagaatataccttttccatattgagtctctataacaattcttggagctttaccttttctaaatccaggtatattgtatttatttctgcttttattataagccttatttactgctgcttcaaatttattgttatctactgttatttttaaagtaactttattaccctcttttttaattagttctgctttcatccttctaatcctcctagtgatatttatgtaatacccgataacggtattataattcattctatttataattcaaccacttaattatatcacataagtttttttatttacaagtgttccattaatatcgttgtacttatttgataaaatttaattttttgagcgttttttgccatttttttagataaatacacctttatatgcgtatttcttcaatttttatgtcatcttcttctatatccataatgacaaaacttttatacgatactcctcttggaagtgaagtgcttccaggatttatgtaaagtacaccatctttaatttctctaaatggggtatgggtatggccaaatataactatatcagcatcaacttcagttgcctttttttctaacatattagttccatattttacaccatacttatctccatggcataagaatatggttttatttgccacttcaaagacaacttcttcctcaacagcatcaaagtcacaattacctttaactgcaataatacctacattagtcatgctatgaatatatcttgaatcagtaaagttatctcctgcatgaattattaggtcacattctttcaaatatggtattgttttttccatatttttaatcatcatatgtgtgtcgcttactatgcctattttcattacttcactaccctttttataaactcttgtttcataagttttagtgcgtttgctctatgactgattgaattttttataacactaggtatttcaccaaaagtcttatcatatccttttactataaataagctatcatatccaaaaccatttttacctttttcttcaaatcctatcattccttcacaaattcctcttactacaaattcttttccatcaggaaaaactactgctattgcagagacgaatcttgcatttcttttgctcattggtacattttgcatagcttttaacagtttttttctattttcttcatctgttgcatgttctcctgcatatctagctgaataaacaccaggttttttgcctaaagcatctacttctaagccagaatcatctgatattgctataagtttagtcttttttgctattgctctagcttttatcaacgcattatgctcaaatgtttttccatcttctactatctctatacctgctaaatcaacatcttttaaagagtacactttatattcaaaatcttttaagatttcacctatttcttctagcttatgagcattattagtagcaatcactacttcattaccataatccatacccaatatctcatctgctatttcacctaaagcttctctttgaagccttattaattctttattccctttttcgcctaactctaacaataaatttaaatctgctcttgaaaaaggtttctcttctcctgtcccctgtacttctacaaactcacacttatcagtcattattatattcatatctacctgtgctttagaatcttcttcataacataaatctagcatgtgtattccatttacaataccaacactaattgcagatacaaaatttgttattggcatctcttttattgtctttgctttatataatttatatattgcttctgcaactgctacaaatgcccctgttatagatgcagttctagttccaccatctgcctgaatcacatcacaatctacccaaatagttctttctcctaatttattcaagtctacaacagaccttattgctcttcctattaacctctgtatttcttgtgttcttccatcaatttttcccctagatgcatctcttatctttctttgttgtgttgctcttggtagcatagaatattcagcatttatccatccagtaccactatttcttaaaaaaggaggaactttttcttccactgatgcagtgcatataacctttgtctctcccatttctataagaacagaaccttctgcatactttgtataatctctagttatctttacaggtcttatctgttcgttacttctatcataacttctggtcattttttatatcctttctcatattttttattttttataaatttatttttataatttttaattttgtcaaatattaattattgtcatttttcgtaatcttattagcttactgaactattctatcattaattatagtagttttctactaaattaagcgactttttaactctctaatacagcttttacttcatctttcgatgataactttaataattctaaaaatctctcttcatctataactttaattcctaaatcatttgctttagtaagtttagaaccagcttcttcacctgccaaaacaaatgttgtcgatttactaacactagatgtagcttttccacctcttttttctatcatatctttcgcatcatttctttttaatgtaggaagtgtaccagtcaatacgattttcatcccttcaaatattttttctactttttcacctgtattatccaatgattttgtatttactcctacattttttaacttgtttataacgttcatatttttgtcttccttaaaaaactcgacaacgctgtttgccattatacttccaaattcctctaattcttctagttgctcactagttgcagaaattacttcatctaaatccttaaagttatatgcaagtatcttagctgctttaactcctataaatttaatacctaatccatttataagtctccataaatcattttcttttgatttttcaattgaatttattaaattgtcagcagatttttcgcccattctctctaggtcgactacatcttccttttttatataatataaatcagatacatcttgaataattttttcatttaatagcagtgtaattatagattctcccaatccatctatattcattgcatcccttgacacaaagtgtataattccccttcttatttgggctgggcaagacatattgatacattttacagcagcctctccttctaatcttattgttggctctgaacaaactggacacttttctggcattttaaaatctatttcatctccagtacgttcctcttttataacttctaaaacttgaggtattatgtcccctgctttttgaactaatactgtatcatttatttttatatctttttctcttatataatcttcattgtgaagtgtagctctacttacagtagtacctgcaagtctgactggttcaagaattgctgaaggtgttattgtaccagttctcccaacttctactattatatctactattttagttttcttcttttctgctgggaatttatatgcaattgcccatctaggacttttggctgtatatcccatttcgtctctttgttttatattgtttacttttattaccataccatctatttcgtagtctaaattacccctgttatctgtccagtattcaatatgctcaataacttcatctatacttttacaaactttataactctgacttactgaaaatcctagtttttctaagtactctagtgattcactgtgactttctaaatcatattcttctatattttccatattaaatacaaatatatctaatggtctctttgctgttagttttgggtctaattgtctcaatgaaccagctgcaagattccttggattagcaaataatggctgttcttgttcttcttgttgttcatttacttttctaaaattatcttttgatatatatacttctcctctaactattagttcttttttatcatttatcttaagaggtatgctttttactgtcattaagttttgagaaatatcttctcctacaactccatctcctctagttgctcctttttcaaactctccattgttataagttagacctacagaaagaccatctattttaaattcaacaacatattcaacattttctcccacatattcttgaactctcttatcaaaatctctcaaatcttgctctgaaaaagcatttgataaactcaacataggagttttatgtacaatttgattgaatttatctaatggcttacctcctaccctatttgttggagaatcaattctctttagttctggatgttcttcttctaaagaaattaactccttcattaacttatcgtattcataatctgatatttctgggctatcttgattataatacctttcattatggtagtttattgtctctataagtttattaatttcatcttttacgctcactttttgcacctcttcatatttttaaaattaaattattttgaaatttccctataattaattatctcctatttatatattttttagtatatcacttttttgactttaaatttattacaaaaaaaactcttattagtatctttaatacgactaataagagtttttatttttatcaaaattttttatttttaatagcctcttgatatgtctacaacattatctacaggtttattctccattatatagtgtttcaaattattataaaccatattaaatgttctctctttgtttttatctgacacccaagaattatgaggagttactatgacattttcgcactcccacaacttattgtccttgtttaaaggttcactttcaaatacgtctagtgctacccctctaaatttctctacacattcttctaaatctttctgattaactgtatttcctctacctacatttataaatacagaaccatctttcataagtttaaacatatctttgtttactattccatctgtactttttgtagaaggcattgctacaactactatatcacattcttcaaatacaatattcatatcttcagtagcaaaacacttatcaaagtattttttactacttccatcagtattgacaccccatatttctacaccaaaagcttttaatcgttttgctgcttctgaagatatagtacctgttcctaaaaatccaactctttgtccatacaattctgatacagaaaaatccatcttccattctttattttgttgttgtttaaaaaattttgcactatttttatatatttctaaaatatacaatacaatactttcaccaataggtacactatatccgcctctattattagctatcttaatatttctcttcaatacctcttcttttggaagttggtctatacctacactagttgtctgtatatattgtaaatttttcatcttagaaatatctaatctctcaaatggattgtatgtaactagtacatctgctgtatttacatcctcattattttcaatactatcttcagagtaatgtatgacatcatagcctaattctcttattttatcaaatttttcttttccataatttattgtaaataaaactttcatctcaaatctcctctatctacccacatttaaaattttatattctaaaatataatatgatactcaatgtacattagttaaaattactataagatatcttaaatttacttatgttcaattgtttttcctaaagacatagcattacgttcttgaactaaattttctattaaattattcaatgtccaatcaatagatgtctctgttaccatagctgtaaaaggtctatttattctcactttttttagaccttctaaaaatgcatttacttgtgtgcttggagtgttattaaatattacagacttactcttaatcccattttcacattcacttgatatatttccatctaaaatgtctcttattatattctctccgtttttttcacttaagattatatggtctcttattccagcaaagttacttacgtttttaattaatgataattcttttttattaaagtttacaagcataatacacttcctattgtgtattttatctaggttattattatttattttttcaaatgacattttatccatcctttcatttatttatatactttaatttaccccatacatttaaaataatcaatttttatagttaatttttatattaatacccaaattacatttaaatagttaggctatccaaaactaatatataaaattagaataattagattaatatctacaaatcataacctaaaggagagataccatgaatacattactaaacaataaatttagcattaaaaacttttcaaatgcttgggttatagtacttggttgtatgttaatacaagctgttccatttagtattgtagcaagtatacagcctcaatttataagttatgttgtagaaggagaaggctttagtttagcttctttttctctaatattcactattggtactattgcctcagcaattgcatcaccttttataggtgtattattttctaaagtcaatattaagatactatatttattaggttgtataatttctagtattgcttttgctactttttctatatgtactgaactatggcaattttacactgtatcatgtattgttcaaattggcgctacaattatatctgctataggaatacctgttttaataagtgcttggtttgatgaagaaagcaaaggaaaagctttgggctttgcttttgctggtggttctattggtagtatatttctacaaccacttgcagttcgcttattagcaactcaaggatacagtcattcttatctaatatttggaattatagcattaatagttggtatacctgtaatattattcatactcaggatgcctaaagatattaatgaaaaggtaaaatctaaaggtaaaaaagagaaagcatctgatacaatttctccttcagtatggggttatacattaaaagaagctaaaaaaattaaatatttttggattatgactattggatttatatttgttggtatatatgtttcatcattatccgtacaatatccaacttatcttagaaattatctaaatcctattctaataggaacagtaggctccacatttgctttatttgctctcattggtaatttatttggaggattattgtttgataaattcggtcaaacaaagccacttattatatcttttgtattggttcttatagcaactttatcattactattggtagataaatcttctacttttgcatttgtatttgccattttgaaaggtctttctgtatttgcttatatgattggtcctgcttatttaactggctctttctttggtcaaaaggagtttggtagcatatatggaatcgtacaattaatttttgcagtgggatttgcattaggttcaacattatttggattgttagttgataattttggatacagattttcttggtctattataattttatcagttataattgcctatactttacttattataacttctataggaatgaaaaaattgaataaagaaagattagataaactaatgcaataattgatttttagatatataaatattataataaaaaagatggagcttttaatcataaataaaactccatcttttttatattacaatatagctaattttctcttatttttaactttactatctatatcctcatccttaactatagtaaatgccttagttggacaaacatttacacatgcaggcccttctggcgattctatacaaaaatcacacttatttgctgtcattctttctctaaagcaaagctttccttcatctacatcttttaatgtaactatgtctattgcacctataggacatgctaacatacaagtcttacatcctatacaattttcttcatttatttttattgtgttcccaaccctaactataccaccatttggacatgcctttgcacaaggagcatcttcacaatgtctacactgtattggagcacttacttcttttgtctttatgacagaaagttttggattaaaatttatttcatctggattttggtaaaaaatatcttcatctgaatgtgcaactacacatcctatcatacaagttctacatcctatgcatttatcagggtctgctataacaaaatagttcatcacttagccacttcctttcctatacaatatgtagtgtgtaatagatgatgagatttttctcctaatggttctaccagatattcatcatacagttttttaatatcaggattctcatgagattttctaattgctaaatgttcatcatgcacgtatgttgcttttgttctattttcataagccaattccttatattcttctagtaaaatttttggttgacctccaccacttacacacccaacaggacaagtcataacttcaataaaatctacatctaattttcctttttccaagtcttcaagcactggtattacattttttaatccacttactactccaactcttaagtctaagtctcctattttaatagttgactttctaaaaccattttctcctcttacttgttttacttctacatcaggaatactttctccagttataagctcatatcctgttcttatagcagcttccataaccccaccagtaacaccaaagatagttccagctccactataactacctaaaggactatcaaatttttcttctcttaaatttttaaaatcaattcccatgtcttttattaaataagctagttctctagtagttaatactacatctacatctctatatccactagaatccatttcttctctatcacattcatattttttacatgtacatggcattatagaaacactaaatatctttgatgcatctacattatttatctctgcaccataagttttaaatattgcaccacccatctgctgaggtgatttacaagaagataaatgattagttaatttaggataatttttttccatgaattttacccaagctggacaacaagatgtaaacattggaagagttccaccttctgtcactcttttaattaattcactaccttcttccattatagttaaatctgctgcaaaattagtatcgtagactctatcaaaatttaaagctctaagtgctgctgccatttttccagcacctaagtatcctaaataatatccgaaatcttctcctaaagcaactctaactgctggtgcacattggaccatagtgaatacatttgggtcacttaaagctttctttaccttatctatatcacatacattgtatgctgcaaatataggttcatttatagactctggtatctctctttcttgttttttctcttgtaaaaactcaaatccttcatctataactgaggcataagatttacaagtttgaacacattgaccgcacataacacatctatctaaatttatctcttgtggctttccctcttcaccttcaatagcatttactggacagacctttgaacattctctacatccagtacataaatccttatctatatttattatcataaacgtcacctacccctgtatcctttatttatttgttaacaataaactaagtgcagcttgtctattcttagcttttttgtcatctattggagtaacaagttttaatgcttcctgaggacatgcacttatacaagctattttttcattgtctttacataagtcacatttataagctatcttcttattttcatctaaaattacttgttctacttctttaccatcttcatattgtggaagtaagtctatagctccaaaaggacatgctagcagacaagttttacatcctatacacttttcttcatttacagacataatattgttttctttgactatagctttttgtggacatgagtttaaacaaggagcatcttcacaatgtctacactgtattggcatacagaaattgtcaccttttactaaataaagtctaggtataacaggtatatcaactgttccaactgtataacccacattattatgctgattatgcattgtaaaacaagctacttcacaagctctacaacctgtacatttgtttgggtccgctattacaaaagagcctattttatttttcatattatcccacctttcaatttgtatatttccaaccctctagttactttcatcatatgtctacttactttcatcatatatatttatatatttcactattttctcagtacttatatttcgtttacattttttgcacaaattgtatgtgttattatacaccttatcagtatcgtcaattaatactccacagatttcacactttgaacatttttgttcttcttttttagtacacatatacttattctcactttttgataactctctgtggatttgcataaatattcatccgtcttcctcttacaaatccaataagcgttatatttaattttttagaaagctctattgataaattagtcggtgctgattttgatactacaataggaatttgagtcatagctgcttttaatatcatttccaatgatattcttccacttacagccacaattttatcttttaatgttatgtcatttaaaacacaaaatccaatagccttatccattgcattatgccttgctacatcttcacaagtgactatttttttatcaaaattaaatacagatacgctatgtaccccaccagtatttttaaataattctgatgaatttaaatttctatccattatactgtaaatcgtatcataatttatttttatattgctctttacagaagcacatgttatatagtctagtgaatttaaaaatataatttgctcatcttgatttttttgtttctcttgaatagttacttttgcaaaacgttcactctcatttatctcaaattttaataagctttttttgttttctatgtatccttttgttttcaagaatcctactataagttcctctaaattatatggggtacataaaaatgtatttacatatttatcatttaaaataaaactaagtggatattctgcaattatttcttcattatctattgatacttcatgttcatttattttgcttacttctacattaaaagaatttaaatatttgtagtccactagactataactattttcaaaaactttatccttactattttcttgtaatttagtttttgagtatatattgttcataaaatattagcctttctgccttttataaatcttaaatctaataaatcattagatatttgtagctgtcattttgtctttcaaactttgatactcttctcttacacatttttctgctaattcttggtcttcaagtttttcaagtttaacagcacaatatttatactctggtgttttagatatagggtctaaatttgctattgtaagttcattgcaagctccaacccaccactgataagtcatatatgttgcaccttccttaactctatcagtaactgttgctcttgttattacacttcctcttcttgaactaattctaactaattcatcatcttcaattcctaatttttcagcatcattagaatttatttgaacacgtcctggttcatcttctaatgaactaagtgttctacaattaccagtcattgttcttactgaatagtgtccaacttctcttacagtacataaactaaatgggtattcatcatcttcaacttccatagggggtctccattcagcagcgaacaaattacctttaccattaggagtagaaaacttttgaccttcatacagatacatagttcctttatcttccatactttcactcttacaaggccattgaacgcatccttgagtttctatcttttcataagtagcacctaagaaacttggacataattgtctaagttcgtcccatatttccttagtatttttataattcataggatatcccattgctgtagaaatttcgcttataatttgccagtctggttttacatctccttgtggctctatagcttttctcatcaattggaatcctctatctgcacatgtatatactccctcatgttctccccaagaagtagctggaagtataacatcagcgtgaagtgctgtcttattcataaatatatcttgaacaatgacaaattccaattcatctaatgcttctctaacttctgatgcatctgggtcactttgcactgggtcttctccaaatatataataagctttaagctttttctcttttagtactaagtctggaacttgagttaaactataaccattattaggagataattttaccccccaagttttttcaaacttttctcttatcttatcatcagttacattttgatagccaggatatacattaggaagagctcccatatcacaagctccttgaacattattttgtccacgtacaggtcctattccaacgctttctctaccaaaattacctgtaagtagagcaattgatgcaagtcccttaactacatcaacagcttgaccaaattgacagacacccattccataaagtatcatagcttttttcccttttgcatattctctcatagcttttcttataagctcttctgggattcctgtaatcttttcagcatatttagctgtatatggtttaacaatttctttatactcatcaaatccttgtgtatgattttgaacaaattctttattgtaaagaccttcttctattaatacatttccaaaagcatttactaaaaccatgtttgttccaccttttataggtagatgtatatcagcaattcttgcagattcagttactctagggtcagtaacaattaatttagcaccattttttttagcttttactattctatttgccactattggatgtgaatctgctccattatatccaaatataaataaaacatctgcattttctatctctggtatagaattagacattgcaccactacctaatgagtaagccagaccggctacagatggtgcatgtcatacacgagcacaatggtcaacattattagttcctattgtagctctcataaatttttgcattatatagtttgcttcattaccaggtcctcttgcagaacctgttcccataatagaatcaggtccatatttttctttaatttcatttagtcttgaagctgtatagtttatagcctcatcccattcaacctcttctagtacaccttgttttcttatcattggcttttttagcctaggtgttagaattttagggtcatttagaaaatcccatccataacgaccttttaaacacaaactttcttgatttgttctaccattagccggttcagctcttaatatcttattatcttttactactagatataattggcatccagctccacagtatggacaaactgttaaaatttttttctccatacaattccccccttagatttatcccctgataagtaaaatttatcttaaagataatgagtgtttttataatatgcaaaatcataaatattttgcaatactatctattaaattcaacaattttctcacaattcctcttaaatttcaaaaaaaatatgtcataataatctttatatttcaaccatttaattaaaatattctagttcttatgacatattttttaatatactcaatatatattctttaaacttatttagttttcacttaaaacaatatttctgccaattctatttttcattctatagtgagtaattacagtaaatattccacttccaatcagaattaaatagtacataaatccaccatataaaaatactgcatatcccatcaaaggttgagggaatactgatttgaatatagtgaaaaaggctaattcattagctcctacattcccaggtgttggtattggagatattgccatatataaaaatgcttgtaatgtcagtatataaatatagctataaccttgtaaattaaatgctttatatatccaaaatgaaacactaaagtaagcacttaattgaataaaagttactattatagttgaaattaatacctttttattctttgcaaaaaaatttattgctttactataatcatctataaaactttctatggattcaatcttattatctaaaaattttaaaaacttaatttttgataaatgctttatagtaattctcataaaatattttatttttttagggtttaaaataactaatattatcataattaagacaaatgaattaatggctatccctagaaacactagaggcataatcattttcatttgtttttctaacatagcaaaattcattaatacaagtattgtacaataaaaagtaaccactatttggaaaataatagacttattggtaacaactgcacttgccttactaagtggcattttacattttttaagtacatatatctgtactggttggcttcctgaagcaaaaggagttattaaattataataaaatcccataatggctagcttaaaaccaataaatctaatattaactttgtgagtgctttctataattatcttcattactactccttcaagcattatgtgacacattattgccaaagcacctatgaataaaaacttcttatctaccataaccataacatttgatagcattttaatatccaatgttttaaacactaggtaaattgttatacctattaacaaaaataaaaatgtatactgtagtaaactctttctaatattctttagtctatccattagaaataaccatcctttgctcaagatttatactaaatactatattattagtatacactatgaatcttaatattttataacaaaataccttacaattttgtcatttacaaaaaatattaatctataaattaaattttaatatatagattaatattttacaaacattttgtagatatatataatattttcactaagcaacacttatacttattacacccatttataccctatcccccatacagtttctattgtataaatatcatattgttttaatttgcttcgtatattttttatatgctctgtgatagtacttatatcactttctccatcaaaaccatataccgactcatatattctttcttttgaaaatacttgtcccttattttttgctagaaattcacatattagatattcacttttagtaaaattaatttttttaccatcaattgaaacttctttgcctaaaaagttaaattgaacatttgagatagttaataaattctttttttctctactttctcgccttaaatgagcagttatcctagcccttaattctcctacaccaaaaggtttggttatatagtcatctgcacctatgccaagaccgtacataatatcactttccatattttttgctgtcaaaaacagtattggacaatcaaccttatttcttatagttttacatacttcaaaaccatccatcttaggcatcataacatctaatattattagattaaaataattaaaatccatgttcatagccttttctacatcactaattacctttacttcatgtccatctcttttcaacacattttcaatcaactttaacatatctaactcatcatctactactaatatcttagacataataactcctccatttatccgtttaatagtattctaatttatatctttaataatatctttaaaattcacattaaccataatactctcatattatagcttacaataattaattactattttacaaataaaatattttagatacaaaaactttatatttcaaaaactttatattcattttacacgcatttacttaaatataaaaatttatttaacaatttattattgtaatattttgaatatataataaaattaataataagaaaactttttataaatacacttttaattgtttaaattggaggaaaaaattatggatgaaaatataacaaaaaataattataatgttccatttgactatgttcgaaaaaaactcaaagaattagaccctcatacaattagtaatttaagtaatatacctttcaataatgatttaaatagattcacactcaatttttttgatagacaatatattatagactatccaagtggagaagtttggaatagtaatggtagcctttgcaataactttgagcttaaaatcttgatagttagatatttaatcaatgctaaaggtatccctagaactaataaatatgtaacttttaaagaaataccaggaggcaatgtttattatccaaattttttaaacaggactctatataggctttcagaagtttttacatctcaaatagacaaatataagttagttatggagaaaattggagctgaaaaagtaaacatgggagatttagcttataggtttacatatatgggtaatacatctatgatatttatactttggtttggagatgatgaatttcctccaaattcaaatatattatttgattctaatatagtttattacttcaatgcagaagatttagcagttgttcctgatacagctataaatgcaattttaaataaaataaatcaattataaatataaataatattataataaagtttttgatagatttaatagaatataatatgaaatggggtaaaaaatgaatgtagaaaatcaatctttatcagatattgaaataatattatcacacaggtatgataatggtgcagactattggactacacctgataagcgtttaataaaaggttctcctttctctactcttgatagtgtactttatctattagagttaggtgtgaaccctgatgatactttacttaaagaatgtgctgacttgatatttagcacatggcgagaagatggacgtttcaaactatatccaaatggaggtatttacccttgtcatactgcaaatgctgctaacgtactctgtcatatgggatatgcatctgacattagaatgcaaaaaacgtttcaacattttttagatacacagtatactgatggtgggtggcgttgcaataaatttagttttggtcgaggtccagaaactgaatactcaaatccactaccaactcttaatatattaaatgcattccgttttagtaattatctaaataaagaatcaaaacttgacaaagctgtagattttctacttgaccattggactattaaaaaaccactcggcccttgtcactatggaattggcacattatttatgcaagttgaatatcctttccgtaattataacctattcctttatgtctacgttttatcattttataatcgtgcaaaaaaggataagagatttttagaagcattgaagatacttgaatctaaaatgataggtaataaaattgtcgttgaacgtgtagttccaaaactatctaaattatctttttgtaaaaaaggcgagtcaagtgaaatagccacaacacactattacgaaatattaaaaaacctagaaaaataatagttatatagataaaacatattaaaaaatagtggctttaaattttttaaagtcactattctatataaatataacattataaaaaatatattaaactatttactcttttttaaaaccgttgattttcttgctatataaaaaactattattatagaaataactactagagaacctctatttataaagaaataattctttaattcattaaatctaacatctatattattaggcatataaaacatcttttgaatataaaatccatttacattaatcatactaacaaatgggtacatatgtaaaataaaaaatatatcagcaaatgtatatgtaattaatattgctattgttgtaaatctattttttgttaatgttaatatcattagtggaaatgttgtataccataataatgtaggaaatgtctttaaaaacacatctattggctttacactataaacaaaatctattttgtctatgttaaaacctttcactgacgtaaatgtatatactattgtaattgaaattaataataatacagtatatatagctaatataacacaccatctaaatactataaattgattatatttttttttattatataaagtaagtatctcatttatattacccaaataatcttttgaaaacacataaattattgtgattgctgacattattggtataaaaacatctgatatctttataattcctaaccatcctgctatagaatatgtatccattataggtacatcattataaaatattaactcattataatctaatatgcctgtaataaatatgcataatatagaaataattacaaatattaacacatgtttaagctctatttttttaagctcaaattttattaactccaatatacacatttattttaactccttatgtaaaaagtttatataagcatcttgtaaagttgtatctatccttaagctatccttaagtttctctgtatttttacctatatactttacttgcacaccatctttaactcttctataatcaataatatcaatattacgttctaaatattcaaattcatcattagaaactactactgaatacacctcaaccatatcaataaatttattaattgtaccatcatataatattttgccttgatttaatataattaatttgtcacagttaaattgtatgtcttctactatgtgagttgaaattaatactatagaatttttacttatttctggtaacaatcttctaaattcattcctttgctctggatcaagaccaactgtaggttcatccataactattaacttagaatcacctattaaagcctgtgctatacctagtcgtctctttacaccacctgagtatgtacctattttattatttataaacttgtccagattaacttttgatactactttttgtatatgtttctttaaatcattcttagatacacctctcattttagctacaaactctaagtattcttgcccatttatattattatacatatcaaaatcttgaggtatatatcctacatttgccttgattttctcattgtttttgctatactttatattatttaattctatctctccaattgaagtttcataaagagtcactaataacctcattaatgttgattttccagcaccattaggacctaataatgcaactactccatctgttagggttaaatttatattatccagagcttttttatttttgtaattaaaatttagatttcttatttctaacttgtttatcatattaacctcctttattatttatctattataaggatatttcctgaaagccaatgataaatagttatgctaattttctctccctttgagtcttcatataaaaattcattgctaggtaagtcagcaactaatatcatattaattttttttctttttattgattccataacattatctacttcatctacatattttttagcatctacagatgctttgctatcacctaatatttcatttcttgtttcaattaaaaatttaattttttcctctatatccatatttacattactatctgatggatagattatttttatatcatcttttacctcttctttaaactcacctgcatatattgcaatatcatttgactttccttcaaatatataatctttttttaaaaaattactagtcttattcagtaaaggtaaatttgaatagacattatttttagaacttaaatttattttataagccatacaacttgattgatttacttttgggtaccacgctaaagaacctggtggaagcataatatcatctttagtagctatatatttattttgattccaagatgtcaacacattaatatagccttcatactctatatctaatgtcacctcgtcattaggctctaaactttcctttaaattaacttcaattaaatccttttttttgttaaattttatattttccgaatttacttttatatattttatatcaaatatttcatctaaaatcatattaatatttgttaactcttcatttgatgtgtttaataaaacaattctatcttttatatttgacttgcttttaaagtcaatcttcatatcatgcgattttattttaatatcactaatattagatttctttaaatactctccataactacgttcctcatctctatatgttgacatatctattgatatataatttaatccaataaataaaatactgtacactactataactattaatgatttaatctgtttctttctaatatcatttaatatcagatatgctactattattaaagtaattgcaaatagtgtaggtataatcttatctataacatatgctgaattattaactttccctacaaaatcagaatagtaagcatatgattgatcttcaaatatattaagtgatttaaataatgctttaaaaaatggttctttaatatcaataactctatccaacatcttagttgatgttaaatataaaaatactgatgataaggtaatctttagtattaaattatttataataactgaaataaatgatatcactatagataaaatagtaagtggtaaaaaccattcaaataccaatataaatatagttgatttaatcgttacaattgataatgttcttattaaacttgagtatgctatagcatatataattggtatgcaacaaaatataaagttgtttctagttacagcaacagaaatacctaaaaaataatcaaaattatttctacataatatttttacagtatcataactttttctcatataaaaaattacatttaacatggttaaaatactaattgtcatacaagtatatacactcaaggataagtaatcattaaatgaaattcctctattggatatatgtgtccatcgttgtatgagatggtaatttataataataactgttattgcaaataaaatattttttctaattattttggttataaagtctgatataaccttaatactactcatatttatgcccctcctagccaatcctttgatacaacttacaatagattcaactatatttaataagttcaaatatttaccttgacattattttttaaaattaatattaattagtgaaattaattaatttagaaaatgttttataatcttactgatcattattaaccttcattccaatatatattaatatagcaatccaatatatagaaattattgcataaatcacatattgctgaaaaatattaagtattttacataaaataattaaacatattattacgaatagtattttttgcacagtctttctataatgctttttctcactttcactaagaggtttgtttctatgttctaaaggagctaacttgtaaattgttagtatactaataatcattaataatactaataaatacttatatttatttatatctatattattagctgaaaaaatagttatcaaataaataactgcaaatgttaatgtacactctttataattcctagcatgataacctcctgtgaactgtcttaaagtgcaataacaacttaaaaatataactgtatgtataaatctatcaaaaataattcctataaataatgctaccgaaatattaactatgaaataaatcaaagtttcaaatccatatctatatatttcaaaatcttcactttctacaatctcattattaactaatatattggcaaatttatatgataatcttttaaacatatttcctcctcaacatgtaaaacctctcctttaataagaagaggtccttttattaatgttatttttttagtttttgtaaagcttgtggctcttttgcctgatgtgctacccaagaacttgcactgtttgctgataatacagctatcccaaaacttaatgctgagatgtttttaagtaagtttaacgctatttttttcattttgtactctcctaactttttattggtatcattatttttaatataaactcattatctgagtaattaactattgtttcaccaccatatttatttactatatatttaatactagcaagtcctattccatgtatcttatcatcatccttactagtttgaatacgtttatcaataagtttaatatcatttaccttagtatttataaattttattattgcaaatttatttatatatgtagctttaacttctattcttttttctagctcattatttatatccatacatgcttcaattgcattatctagtgaatttgcaaatattgaacatatatcattattttcaataaagtttaatttagatatatttatgttatcttcaatttgaatatcatactttttacaaatacttattttttctgctaaaattaaatctaatgttttatttccagtatttttaaaatgttcaaattcacttatctgaaactctaagttatctatatatgatataatttcttctttagtgtcataattttttatacaaatcatatggtttttcaaatcatgataaacatattttaatctatcatgaacttcgtttatattttcataattcctgtagtttgtttttattctttcatttataagttcatactctagatttaatttatcgtcttgtacaattttccctattactattaaaagtattatacttgatgataaaatcaataaaattgcaaatataaatataaataagttttctgtagtaattgtattgactcttaaattatattcaaatataagtaataagctaactatattagataatataggtattcctattagtatcatatctttaggtttaaaatctaaagataatttaaaatacttaaacaatataaaacctataaataaaaatacctttgacataataatagcttgtattctaaataagttttcatgttgtgttatgttaatattatttaatttatttataaatactactagacctactgcagaaccttcagcaatcattaatcctagccaaaacaataaactaactattatacttttatatattttatcttcatatgatgttatataaaatgatattcctattaccatacatagaagaatcttaatatttggaaacactttaactacatttatgtatgccataaatataaatataattattgttgtaaatatatatcttatattagatattttcctctttccaactaagtggattactaaaaaaaatataatccaatctatagtacctgaaactaaattaataatattccaaaatcctatacttagatttgttagcatactatatcccctaatatattagttatagcaagtttcaagcctttaactctatatttacttattggaatacttttgccatctactataacagtacttccactcattgattctactaattttaaattaactatatagctattatgacatctaaaaaatccatattcatttaatatcttttctattttagatatactcattttagtaatatacatatcatcatgtgtataaatcaatatattcggtctatctgtttctatataagtaatagaatctattttaattcggtctacataattttttacatttatagttaagtaattatttctctttttcatcatctcatttatacaaggtaatacacttttagaaattttttctttatttattggctttagtatatatctgtatgcttttacctcataaccttcttgcataaactctacaaatgaagtaacaaatattatttctaacttatgatcaaactctcttatcttcctagcagtatccataccatttattgttttcatttgtatgtccataattaatatgtctaaatctttaggatagttatttagtaactcttctcctgatgaaaattcatatatgttataatttataggatatgaacttaatatttcacttaatatatcttttatttttattcgataatgtagttcatcatcacatattcctatactaatcacaattcttaaacatcctttcttatatatttttaataaatatataaaatttctattcattttacatattttaacatacttctgtagcaaatagctatttagattttaattttagctttttggacattaagtattactttttggatttacaatctattttaattttcattataatacaattttttaatatatattgaatatatttagcgattttaataacatattcttcgagaagtttttagtatctagtttttgttaaacaaaaagtatgcaccttcctttttatagtaatattttaattatcgctataattttgaagaatacacactatattttaaatattcatataaaacatattaaaaaatagtggctttaaattttttaaagccactatttttttaaatgatgttcctgaaaatatattaagttagttattctaatcaatttgaagacttttgcttctccttgcctatatctaacataatttcataatttaatttacctttctttaaatcaactcctgagttacttctaataatcccacaatccaacatttcgtcaaataccttcctagataaacctagtttctcacgtaataatgttgatacctttaactgacatggatatttactaataatatgaacttgtgtaaggtcattaatattaatttcttgtcctactattttatactctggaataccaacttctgctccatttctatgtaaaagttccgtattcatagcatattgcttagcaagattataatcgtttgtatggaattgttctagtgtttctggatttaagctttttggattgacacgagaatatatagttgagttccatgttgaatcacaatttgaacacttgtatattaaccatatatccaaatatttatgttgagcattaaccctaaataaacctgaacaaatatattcagtcttttttccacatttcttacaatacctaattacaggtaactgggagatatattccacctcccaagtaatttttttcataaatgcaacttcctttctataagattactaaattaatagaaagttatgaaaaggtggaatataatcaagtatttttttcaaaacaagacctcctaattttaataaattttaatttcaaacatataaaaagctactacttcttattagatactttacaactctattcgttatctgctgtacaagttattgaaattatttaaattatagcatccacttataagaaactatacctcaaacacttttatcaaaagaaaatgagccagtataattataaaactatactggctcattcttaactatcttttcttttttcttgtaatacaattctttgaatacttttcaaagacaagtaatatttttctgataaatatttcaaatcatatccaacttgataatcttcataaatttgcatatttctaattgataaatcttcacgagtagacgtactacttccccattcttttttattattagactttctaggaatatagatatattctccatctacatattcctgtatcaattcaagtaattcttctggtaatatatgtattgcttttttatagctcattctgcactcctattaaataataattttttattaggaatagcaaagggctatttatatattaaattttatatttgcaatagcccttgctatgcaaaaataaagattaaatcaaacataaatctcacccctccttatatattgcaacgatacatataagtctatcagcagtataaatagttgtcaattaacataacttcttcatctaacctttatattatctttatttattttcataattcatctattttagagactaacttttttcttcttattagatatatttaaagttattaatcaacataagtcctttatcttgagggatttattaccgaacaaggaaccccaactatacactttccacaaatatcacaaccacctatataagtgtattttttttcatttatcatacacatttcataacacttattcctattaaatccatcttcttttaaagcttctttcacgcatttgttgacacattttttgcaactattattatgtttatacaagcagtattcattttctggtcttttagttggctctaattctaaacttgtgattatgcttcctattcttccacaacaccctttttctgtaataagcatattatttaaaccaaatgttccaagacctgctatgaatgctacatgtctttgtgaccagtcacttaccaatttttcactgtcaaaattatacgacccaggaatagcatatgaattagcccccatcttctctagttcttcacataagaaatcatttaaatttgaaatcaacatattagtttctatgtacgctcttgcccatatttcagaacattcaaaccctccaatattactattatttacactttcatcaaaaggtataaaatatgtaattatagtttttccattttccagaaaatcttttggcatagcatgagatgttcctacaacactttttagcttctgaaacatatcatcttcagcagatgcataagcaaacaaaagttcttgccactttgtagttatattatttgatttatgataattttttacaaagttgttcattgatgtttcaatcttatttttcatagtatcacccctagataattctatatttccaatttaatgttattattttatattatataatagtattttataatatgcgcactaattaatattaaaactatgttcatcaatcattcttaaaaaagctcctaatatcaatacgatattagaagccttttcttatctaatctaatttattgcaattcctgcacttgcatatcctgctacagtattaactaatgaaagacctgaagctgttgcagtaaatactagtaagaatcgagtttctgctgttgctgctatatttaatcctgttacaattccactagaaattgaaccaactgataatatacctgtaagtggtggagctagtgtaactgtcgctcctggtacagctgtaaatgagttatttggtgcagtagattggtaaagtgttgctgtaattgtaattgttgaaccaacaagtgaaagtgctgctgttgtactgaagtatgctgaaatagatgttattgttccatctcttggcattgaaaatgcaaagttagtcaatgtccctgctgcgtttgtaaggtctattactccaccaactatacttaatcctggagctgaactaccaaagccaacaaaacctggtgtacctactaatcctccagctatagttgtaagtgatagtggtatacctgatgcaaaaggtattattgcactagcacctgttgggcctgttggacctgttgcccctgttgctcccgttgctccggttggacctactaatccatctgcccctgttggacctgttgctccggttgcccctgttgctccatctgctcctgttggacctgttgctcctattgggcctgttgctccggttgctcctgctaatcctgttgctccggttgctcctgttggacctactaatccgtctgctcctgttggacctgttgcccctgttggacctgttgctccatctgctcctgtatttcctgttgcccctgttgctccggttggacctgctactccatctgctcctgttgctcccgtcgctccggttggacctactaatccatctgctcctgttggacctgtcgctcctgttgctccggttgctccagttattcctactccggttgcccctgttggacctgttgggcctactaatccatctgctcctgttgcccctgttgctcctgttggacctactaatccatctgctcctgttggacctgttgctccggttgcccctgtcgctcctgttgctccatctgctccggttactcctgttgccccggttggtcctattagtcctgctgctcctgttgcccctgttactcctgttgggcctgttgctccggttgctccggttgctccggttggacctattaaccctgttgctcctgttattcctattcctgttgctcctgttgcccctgttgggcctgttattcctattcctgttgctcctgttgctcctgttgggcctgttactccatctgctcctgttgcccctgttgggcctgttgggcctgttactcctgttgctccatctgcccctgttgctcctgttgctcctgttggacctgttattcctattcctgttgctcctattgcccctgttggacctgttgctccaggtgttcctgtcgctcctgttggacctattaatcctgttgctcctgttactcctactcctgttgctcctgttgggcctgttggacctgttactccaaatcctgttgcccctgttgctcctgttggacctgttattccatctgctcctgttgctcccgttggacctgttggacctgttactccatctgctcctgttgctcctgtcgctcctgttgggcctgttgggcctgttactccaaaccctatagctcctgtcgctcctgttgggcctgttccccctgttgctcctgttggacctcttaatcctgttgctcctgtattccctgtatttcctgttgggccagtcggaccggttggtcctgttgggcctgttccccctactcctggacctgttggacccgttggtcctgttgggccggttctacctcttggacccattgggcctgttggacctacacatgatggtggacagcaatgatggcaatcacagctattataatcatcacgaccattattacaatcatcatatttatcatagccattgttgtaatcattatcatcaaatggtccaaaatatttatttctactcattattaaaagcacctcctgatatatttgagcttttaagctctatatataatatgtcaaatttagtatgattgtgacctatcaactatttttaaatttactaaaataattttcattgtgcaaaacagcactatcgttaggtttgatttcttttgttttttcatgataataaatagctttatctgattctcctaacctgtcataacagacacttaattgtatagatggtatatatccataacaatcatttgacttaaaacctccattagtatcattcttatctcttgttaatgctaccttataccaaaaaatggcttctttatatttttgtctatcaaacatatgctttcctatgtcacaacaaatttctgctcttggctcatcaaattcgaaacttctaaacaatgaatataaggcacttttttcatcattaattaagtaataacatgtggctaaatctctgcaggcactgatacaatcctcaatccatcctcttgatgagtctaaaaacttagtaaaaccttctattgcttctttatacctagcattatagtacaactctctagagtaatagaattggtgtcttggctccaatgtttttccttctgaaatcattttttcaaaaattctaagatttcttagagggtcctgtctatgaagctttttatgagatattgcaatgtcagaataaaatacctctccaaaaagaggtactacttcatgaatagggtcaacccatttatgattagaacttcttttaaacaatcgttctctataatatgagagagttgggttaccattttcatcaaaggatacattgtattttgccataacaatatcaatggaagtatccaagctttctttaatctttaataatttttctctatcagcttctaaaattatgtcatctgcatcaagccacatagtatagtctttagaagctttagaaaatgaaaaatttcttgcagcagagaaatcatctatccattcgaaatcgtacaccatgtctgtatattttgagactatttcttttgtggaatctgtagaaccggtatctacaattataatttcgtctactatatcctttacacattctaagcatctgcctataacttcttcctcattcttaacaatcatgcacaaacttattgcaatcataatgtacaactcctttgtcttctatatattgcagacataagtaatatatggtattttctcttgttttgttattaaatttataaaaacttttgacgacagaaagttactaaagaaccttatcttttatgtattttttatagtagaatttattaaacttgaaatttggtaataattgttgaaatgataaaaccatatttaatttcatacaaaaaagagtgtcccataaactaaaaagttcattttgagacactcttatttaatattatatatatatttgtaaaacagacattttaatatgatactttgatactttattcattcctattcattcctattcattatataatcaatcagcccgtactctttagcctctagtgcagtcataaaattatctctatctgtatctcttctaatatcttctattgatttacctgtattttcagaaagaattttatctaatcgttcttttattttcaatatattatctacagctatttttacatctgttgcttgacctttagctcctcccattggctgatgaatcataatctctgaattgggtaaagcacatctttttccatgtgttcctcctgcaagtaaaaaagcactcatacttgcagccataccaatacagatagtcgatacatcacatctgacataattcatagtatcatatatagcaaatcctgatgtagcagagccaccagggctatttatatatataattatatctgaatctgggtcttctgattctaaaaacagtaattgagctactactaaacttgcaatagcatcattaatttcttctcctataaatataattctatcttttaataattttgaatatatatcataagacctttccccttgacctgtttgttcaattacatgtggcactaaactcatgctactttcacctcacaattaatattaaagttaagataagaattgatttcatctcttctttgtttataattcatatttgcataagaaatacatttttcgctttgaatttgatgatttagatttaaaacaaatctctgttgaataggataaaattcatctttatttctatatacttgtggagattctttatataaatttctaaatgctagtgtaaaagattgatgtgtagaatatcctactgtaatagctatatctataatatatttgtctgtaaatataagttgtctagctgcttcagtaagtctcctcctctgtatgtattgatggatagtacatcctacaacatttgtaaacattctgtgtaaatggtattttgaataattagcaatataagctattttatctaaatttagattttctgtaagattttcttctatataatcaattatctccataataacatctgtatttgttttcaactctatcctctccttttaagtattataacctatgcaaaaagttttttcttaatataaattgctatcttaatttagtgtatagcaataaagtatcgataaaacaatatcaagtatttttatacaaaaatattaatatatatttcttttaaagtttaaacttaattacatctattatatgtagattgctacatgttttatctatgtaccttgattcatatgtattattttgctgagtatttttacacctttttcaatttcatcaaaactaagatgagcataacctagtataatttcatggtcatattctaatatattctcaattgcatattgttgtataggataaacttttatacctgcttcaaaaattttatgaattaaactttccgtaaatttaacattatagaaatgagcaactatatgaagccctgctgcttcaccttttattttaaattcatttttaaattccgtgtttaaaacttttatgagatatttacgttttctattgtacaacttcttcattctaaatatgtacttctctaaacctccatttccaataaattcagctaatacatattgcaatattgtttctgtatgaacatcagagtacatttttaaggttttatagctttctaaaatattgtctggtaataacataaatccaacacgaatagctggagataatattttactaaaagaacctatgtaaattactttatttgggctaagttcataaagagaactaattggttgaccctcatatctaaattcactatcataatcatcttcaattatatagtaatcattctctgttgcacatttaataagctctagtcttctttgaataggtaaaatccctcctaatggatattgatgagaaggtgtagtataaacaaaagaaatcccctttattgattttattaagttggtattcattcccttatcatctactttaattccaacaactgaatatccaatagatgaaataacctttaataagcctttatgaatagggtcttctacagcaacctttttattacttttgtataaaagctgtgaaattaaagataaaccttgtgttgaaccagaaacaatcataatgtttttggaattacatctaattcctctagtacgaaataaatacttagatatttccactcttaaaacccatacaccagctgtacttccatatctgaaatccgaatctgataaatcatacagtatttgtttatatagctttgaaagttctttgcgtggaaatagttttaattctggaactcctgaacgaaaatctatataatttttttgtttattagtatgtaaatctttttcatctctaaaagtatcatttaacttaaaatcaactttatgccctgatattcctttagctacaattgttccatatccattccttgtttccaaatatccttctgcaattaattgattatatgcatctaaaactgtattacgagatacagatagttcttttgataaagtcctagatgatggcagtttttgctcaaactttaagcttccatccagaatcatatcttttatctcacaataaatttgtcttgataatgatatattactatttctattaatcgtaatccacattctaatacctccaaaagtggttctataaaattactataaaaatggaactacaaaatccacttttaacttgctaagattatatcataaaatataaaataaaaaggagtctatattatgttagaaatatcacataaagttaaagaaatttatcccaatattaaatttggagttatggttataaatattacacattcaaaacctaataaagaaaattttttagttcttaaaaactctacaattaaaaatattatagaacaacacccagaatacaatcgtaaagaaaaaattaaaacagagcctgtttcaagttatataaagtattataaaaaattcaagaaaacttaccctgtattgcttcaattagaatctattctattaaaatcaaaaggtatcccagatgtaggtgtaacaattgagtcaatgtttttagcagaattgaaaaatcttcttctaacagcaggtcatgaccttgataaaatggaattacctttgaaaatagaattagcaaatggaagtgaacatttttatggtataggtggtaaagagcatattttaacaaaagatgatttatttttatcagataatattggtatattatctagtattcttaatggccctgataatcgaacagctataacaaaagatactaaaaatattatgtattttgtatatggacctgataaaatatcagaaaagcaaattcaagaccatttaaatgacataaaacactatatttcaagtgcttttccagatttaaaagttaattcaattgatatattttagttaatatattaaaatcctcataaatattttgaataaataaattagtgaagtatacattctagttaaactagatatacttcactaaaattaattatatgtagatattatttattttgaattttgtttataataaacactttattacatttatcctatgaataacttaattttataattaaagagtttcataagaaacaatttcacttaaaggaacacgagttttttcatgtctctctgggctctctggtatcttagattcatatcccatcaataatatatttattggttctagattatctggcaaactaaactcttctctaattatatctggattaaaatagcacacccaaacacttgccaatccaagttcagttgcctgtaacatcatatggtctgtaactatacttgtgtcaatatctgtaagttgtctcccatcaaaaggtcttgtccaaactttgtctttatctccacatacaagaattgctaatggagcatcatatatattggcagccttagaaagtttatttataccttctttttcctgaataacaatcaatctttgaggttgacgattaccaccagttggagctattcttgcaacatctaaaaccttctcaagtttttctttttcaacctttctatcttgataattacggcaagaatatcttttttttgtaagttcaacgaaattcatttatttaccccctattgttttattaggctaagttgatgatttatttaacctatgctataattttatcactatggtactatattacaataatgcacttttttgtaatatagtatctaaaaagatactttaaaataaataaaggagctcaaaaatgaaaaaatgtttagataattacagttgcccaatagaagcaacacttgcattgattggtggtaaatataagacacttatactttggcatcttaaagacactatattgaggtttaatgaattaaaaaaattaattcctaaagcaacgcctaagatgttaactcaacaattacgtgaattagaatcagatggtttaattataagagtggtttatcctgttgttcctccaaaagtagaatactcgctatctgattttggaaagagtattattccaattttagattccatgtgtgactggggttctgattacttagaaagtctatagagcattacagtttaaatcccattgctaatttaacttcatccatttgttctctagatgtcaacatttctaaaagcttaaaagctacatgtggagctgtttctggacaatatgaggttataatatttttatctacaacaattggttcattaactacatttacatcaaactcacttaactgtctttgtcttttaccatttttcaaatgatatgtagtagctttacgattttttaaaacaccactttttccaactggcaatgctgccacacaaatagaagcgattattttttcttttgaattaaactcccttattagatttaaaaaagatgaatcatatgcttcatcataaaatccaaattcttcaaatcctccaggaatagctagggcatcataatcatcaacacatacttcttctatcgtcttatcaactaatacttgtatattaaatgtactcataacttgttttttaaatccacaagtcactacatcaatatcatgcccataatcgttacgagcccatcccataacatctacaaatacactaaattccatagtttcaaaaccttttgctaaaaaaactaaaactttcatattctattttcctcctaaaatataattaacactttactagtaaattatttaaaaaatatcttttattgtattaaattcttctttaattgtagataaaacaatggttgtattagctttttgaatccccccaatttccttcaaagtcactgatataaactcttcaagattacttgtatcttctgctaatacttttattaagtaatcatactctcctgaaatatgatgacattctaatacagtatcatattccaatatagttttcttaaattctttcatacttttagataaatcagtattgataaatataaaagccaaaagcttatattttgttttttcccgattaatttgaatagtgtacttttgaattaaatttgactgctcaattttccttatacgctctgagactgctggtactgataaattaatttgtctgcttatttcagaggttgaagccctactattcttttttagagaattaattatttttaaatctatttcatccagagctactcacctccttaattatttaatacaattttagctaataatttacattaagtaaataaatttaatcatttcaataaaatttaatacaaatatgttatttttccttaaaattttagttttctttaatcaaaacacatataatacttaaaattatttaagttgaattaatgtttttattttgtataatatattagaaccttaatatatcattgaaaattcaacaatactagacatatacttctacatgttgtaatatttatgaaaatagtatccctatatcaaaagtataaaactcataatcttaattttcccatagactataaaattttattggtagcgagtcttcaaataactttgtaatgatagatttactaaattaatataatatatagcaaatataactttcttattgactataaccaagtattatgataacataacttaagctataattaataaaacatattttaaataaataagataatccacaaagtacaaaagtacaatttaaatatagataaactagaattaatactaaaattaggatgtgaataattatgatttatatagaattagttaaacttgttagaaaacttaactctacacaaatgtatacgatgaagcgttgtgtagaggttaatctgaaagcttaaagctttctatcttcatcggcaaatataggtttagtatagttttttggctatgcttatttaaaattacctatttgccgatagatagtatagattttctggtcatagacaacaatgcttgtctatgaccttttgtttttccaaaagcagaggtcggcattttacaatgccattcctctgctttttttatttccataaattttttaataaaagaaaaggagtttgaattatgagtttattaaaagtaactaatttatcacaatgttttatggataaatcactgtatgagaaagctaactttgatttattcaaaggtgaacatataggtgtagttggccaaaatggtacaggtaaaagtacattaattaaaattttattgggagaagttgttccagattcaggagaaatcaagtggcaacctaatatcaatataggccatttagaccaatatgcagaaatcaatagagatacaacaatatcactctatttacacactgcatttgaagaactttataaaatagaaaaggaaatgaatttactctatcaaaaaagtgctatatctgaaaatgagcaatatctaatcaaagcatcagattatcaggaacaactaatagcaagtaatttctattctatagataatgaaataaataaaatagcaaatggtcttggattagattcaataggaatgaatcgtgttgttgaagagcttagtggtgggcaaagggcaaaggtaattttagcaaaattgctactttctaaccatgatgttctattattagatgaaccaacaaactttttagataaagaacatgttgaatggctctcaaattatttaaatacatttaatggggcatttattgtagtttcccacgattttgattttttagaaaaaatttctacaggtattcttgatatagaatttggtatgattaaaaaatatcatggaaaatattcagagttccttaaacaaaaatcacatttaagagaagattatattagaaggtatcaagcacaacaaaagaaaatagaaaaagaagagacatttatacgtaaaaataaagctggagtaaattcaaaaattgcaagaggaagacaaaaacaattggataaaatagaaagaatagctcctcctagttttacaggaaaaccaaatattcaattttcagaaattgaaatatcggctcaaaatgctcttactataacaaatcttgaagttggatactactattctttacttccaaaattaaatttttctgttgatggaggtcaaaaaatagttataactggttttaatggaatcggtaaatctaccttgttaaagacattagtcaaagatattcctcgtatatctggagatttccagttttcagaacaagttaaaattggttattatgagcaagatttaaaatgggaaaatcctgataaaaccccacttcaaatagtagcagataaatatccaaaattaaatacaaaagagattagacgtcatctagccagatgtggtgtgaaggaagagcatgtttcaaggagtgtatctactttaagtggtggtgaacaatctaaggttaaattatgttgtatgatgttatctccttgtaattttcttattctggatgaaccaaccaatcactttgatgcagagacaaaggatgctttacaaaatgctttgaaacagtttagaggaagtataatcctagtttcccatgaagaaaaattttataaaggttggattgataaagtgtttaatatagaaaaacaattagtataagtttatacacaatatacaatattatttaattgatatttcaatgcaaattttaatgttctagttaatgtttcactgcaaataaactaaaaaaattttattagaacataaagtacattaccaggatataaacttaatgaggctatctcaaaatagagatagacctcttcttcattgttgagataacgaaaatacatttgacttcacacataaaagaatgcctcattaactaaaaattcaacttgagacatcttcattaatattaaaatctattctaatcgattctattcacaagtttatatcctagtcctttaaccgttataagtattttaggatttgaggggttatcttcaattttttctcttatatgtcgtatatgcaccataattgtattgtcacaaatactactatatactccccatacttgttcatagagtctttcttttcctataattttatttacattttgagccatgtagcttaaaagatgatactcccttccagttaactcaatctcatttctatctttatatacacggtttccttctatatcaatagtaatatctcctattttaataactgcactatctgatggtacaatgctttgatactgttgtctacgtaattgcgctttaactcgaaaagcaatttctcttggactgaatggctttgttatatagtcatctcccccactactaagacctagtattttgtcaatatcatcattttttgatgataaaaaaagaatagaacagtatgaaaactctcgaatttttttacacacttctataccatctatatctggtaacattatatcaagaatgacaacatctggacatgctatcttacacagcgaaatagcatctaaaccattataagctttaataatgtttttaaaaccatcatttatgagtacttcttcaattaaatctactatatctttttcatcatcaacaagtaatatttttttattaaaatatgtatccatattgaaatctctccataaaaatttattatattctaatcttgcagtatcaatatcttgtttttttatattcactactcttgcttttacattactaatagtaacatctctaatagacaaattcaatcactatgaaaattaagataagtttctttaaaataaagtgtatgatacattaaaacctatagaaaattaatttcatccaaagtttataatattagactaatacacttacagatacagatacagattaatacaatagtaaaataaaaggagttgtcttaaaattgactttttctaatcaaactttaagttcaactcccttttaaacttttatatgttatttttattaattctttatatcaattataactttaattttcaatagtatatatctaccactaattgaattacttattaaaacataaaatatctacctaaactatttatttaatatctacatatatttatatctattcttatacttacatatacaaaaaatggttaaaaataaagttaaaatctcagcacttggtactgctaaccatatcccatttatatttaatatatttggcagtatcaataaacctatagttataaatccaaatgtacgtagaaaagataatattgcagagaccttgccatttgacaatgctgtaaacatagacgaagtaaaaatattatacccacaaaaaataaaactaaaagaaaatatataaaatccagaccttgcaatttcataaactcggcttcctctttgagaaaaaatctctacaatgattggtgaacatgatatagaaaagataaataccaataaagatgccactgaaataaataatatacaaatcttaaaaacatgatttaactgtgtattattttcacttccatagttataacttattattggtgcaacacccattgagaaacctatataaagcgaagttaaaagaaattgagaataaataattattgtaatagctgcaactccatcctcaccaattaatttcatcatcatagcattaaataaaaaagtagtaactgctgttgatagttgacctaccatttcagatgaaccattaaaacaagcttcaaataatattcttttatctagtctgggtatacaaaacttaagtaactctttattttttgaaaagaaaaccatacctgaaacggtaggaattaggtatcctactccagttgcaagtgctgctccactaatacccatttgtaacagaacaatgaacacatagtcaagaattatattagcacacccagcacctaacactagccataatccaaattgaggctttccagctgttacaaataaacattgaaataatacttgtagtatatttgcagaagcaaaaaccaagataataaaaagatatgaacgacaatatttaattaaaacttcacttgctcctaaccatataatgatataatccataaatacaatacctataccagtaattattaccccaattacaactcctgataatacgattaaagaaaaagctttatttgctccctcaatatcaccatttcccatcttacgtgctacaatagcacttcctccagtggcaagcatagttccaattccaactataagattaataattggacatacaatattaattgctgatagagcatttgtattaataaatcttgatacaaatatagtatctacgattgtatacaaccccataaaaatcatcataaaaatagtaggaaatgcaaacttcaatagagtaaataaattaaatctttgtgccagtaaattatcttgctcataaagattatcttgttcatgattttctgaataatatacatcactcattttgtttatttttctgtacattaattatttttaaaatatattccaaacaattagacatttacagacctcctttctgcataagaattatatctaattatttggatatagttttaattaatcttgcttttttacacaattatatttctactaaagaaacttttaaatccttactttaatcattttatagctttcagtgcctttagcgcaaatacttgttcacatagtttagtgtcatatgaaacgtatttatatatagttatacattgtctatttttactaatttattaactacttgcacttttataatgtctcatacctaacttccaaaatctccacataaacaatgtaaacaaaaatacaattaaaattgagtatattaatccattaattgttattgtcccagccaaaatttgagtcggaattgtcgacataattccatatggtaagattaaatagaataatactttaaaaacaccttcatatattacaccaggaattttcatattcattggcaataaattatcttctaatctcattatcgcagaagatgatataacaaaaaatgaaactgttctaagtatgatacatacatcataaaaaagtaatgtcatcaataacaccatgaaaatatatattattatcataactaaagttatctctgagtttaacttagatattccatataaaacaataagtatacttgctagaattaatggtgatgaaccaatattaatattttcaaatgttaacctaaatagtgggtctaatggttttgtaatatagtagtctaattctccttcttggatttttcgtggaatatcataaataccaaaaaagaaaatcgtcatatttatcgcatttattaatgagaaagttcctataaatattaacatctctccttgttgccatccccctattgagtctacatgagaatatatactattaaacattagaagttgtaatataaataatgaactatctacaaaaaatgctccaaaaaaatcaaatctaaataccatcatctttgataatttcatttttaataacataaatattattttcaaattttttttcatcatatacccaccccatcaaataatgttctcattcttttatacataactttatttactacagaaaaaaataaaacccataatgctagaataattaatccttgtattgcctcattgctgtttctacctattagtaacatagatggcaaatatgttgtataataaaatggaaataccttcataactgttactatagtttctggtaagagtacaagtggtatcattgttcctgtaataaattcaacaatattttcaattatcattctaaaaaaactaatctcaagaaatttaaatgacaaaatcccaataaagaagtggagtttcatcataaaaataaaccctagaaaaatcatcaaaattgaaattaatatttgaactggatttgatgtaaaggcaaaatctattttaaatataaaaatccatacaaatgcagaaatcatattaaatacaaaataaaaacatgtcattccaaaatttttagcaataaaataattttgaacattaattggaataatcatgtactttgaaaatgtgcccaattttacacgattacatatctcttcactggtactctttgacatatcaatacctgctaaaaatgagcttattatatagtaagacaacatagagttaaatgtaaaaccagagactattttattttcaccaaaaattgctttccataaaatataagcaaataaaatttttacaatcgtaaacaccatattaaccaccacatcaaatctccagataagttgcactttaaagttaattttggctacttcataataccttctaatactttgtttaaatttataaaacattgaataatttgaacttgcttcattatagttgctcataatactcatcacttcctttcttatatattctctctacaatactacctatatcttcttcttcaatcattacatctttaacatcatatttatcaaaaatccatttaatcgtttcatttcctctttcttttagcacaattactgatgtcttatgatttgtttgttcaacaactttacaatcttttggaaatacaatgttagtttcattggaaaaactaactgttatttttttatatttttgaaaatgattaaatagtttctctgtagaaccatcatatattttacggctattttctacaacaatacttctactacagagactcttaatatcttccatgtaatgagaagtaagtataatagtagttccttttgtttcatttacttcttttaggaaatacctaatttgtttttgggctatagcatctaagcctatagttggttcatccaaaaataatatttttggattatgtagaagggctactattaattccattttcattctttctcctaaagaaagcgtcctaacttgaacatttaaatagtcagatacctcaaataattcgataaagtaatccaagttttttttatattcttcattagatatatcatataattctttaaataaaagaaacgtatctgctggtgtcaattcaaagaatagttgacttttttggcccataacaacagcatattgttttttaaaattattttctaatttgttagggtaataacccataacagatatttctccagaagacggtgcaataataccagttaacatcttaataagagtagttttgccagctccattttgacctattaatccaacaaattctccttcttctatctttaaatcaaatgacgatatagctgttttttctgtatatttcctattaaataaagactttacactccccataaatcctgcctttttctcaaatcttctataagatttagtcagttcattaagttcaattatactcattttaactacctccatatttcataatttatataaaaaaagtccacaggtatatatctgcctttttctgtgcttatatttaacagcacaaaaacagaaaactcctgtggactagaaaaattaatgctctctatttcaaaatagttatcaaaataatactatacaaaattaataaaagtgtagcagattaaagcctactacaccataatttaacaaagtaatatatattttaaatactatttgttgtcatatgtcagttatctataaaggcagaataagacacaaaaattaaatgtattaaaaatacacttaaaatttctgattatacagaatatatgtgtctccaactatttaattgttggttaccattatataactccgacatcaaggcactcctctcataatattattattgatatcatatcataaaggttatttatgttcaagtatggatttatatactaatacatttagcttatttcttcagggttgaatttaaatttcatttataatattcgtttataaattaaaaatataatacgtatattaaaactggttattttactgtaatatttttattgtaaaagatatacttttacctatacaggatgtaatttctttagttctatattataataatattgtaataagagttcaacttataatacagtaaaatataaactgtaaatcttaagggggtaatctatggaaaataatacaatacaaaaacaattaagagatttatcaaaaaaaatttggcatatttatattttaaatccagaagaagaaaaccttaaatttattatttccttattagataacaaccttgcattaattggaacaggaaaacatgaattttacgaaacattagaagaatttattataggtcttgaaaaagaccaaacagaatcagagcaaatagactttgagattatagatgagtggtattcatgtaccaaagttacagacgaagcttttatagtatatggtactctttgggtaatagaaaaagattacctagaaaaagatatctatgtagaaatggatactcgatttactatggtatacagagttacagatgatatgattaaacttatccatgttcaccattctattccaaactttgaccaaatgaaagatgagtattaccctaaaacaataactgaaaaagcacaagaagcactagcaatggcaaatgaatttaaactaaaatcagaaaaagaccttatgactggactatacaatagacatttttttgaagtacacataaaagaaatgcttaaaactgtttcatatggatacttttacatctttgatttagataattttaaacaggtaaatgatatctttggtcatgttcgaggagatgaaatactaatacagttttcaaatattttgactaaagtattcgtaaatgatgctattattggaagacttggtggagatgaatttgctgtttttgaatatagtaatcaatcaaaagagaatgttgaaaataaagcaaagaaagttttagaattatgtctagagagtaattcttgttctataggtatatctaaattagaaaataaatctgatactttccagtctttatacaaacaatcggattatgctttgtattattcaaaacgaaataataaaggaaactttagttggttttagtacaaaagatattaaaataggcaaatttattagagtatcttgtcctatatactaataagtaaagtaaacaacaagctatctttgcatatatttatataaaccaactattcttaataaaactacaatagtcaacatgaccactattatagaatataataaactaaaaacattattaacatgattaatattatattttaataattttatttttaaaagtaagtccaaaatgttatattttttgattaaaactgatgttgatataaaaaattttacttaaaaaaacacttagaaaggctttataaagagccttttttgcttttattgattaaattttcatataaaattccttattaaatttcaaatcaataaaaaaaggctctttataaagcctcccctatttttattgattaaatcctaatatagacaatgccttagcatcatagtaagtagtcatctctcttgttgcatcctttaatttacggtaatcaaagtctaatgctccaccaaaagctgatatttcagacccatcagacctataccatttcccatcaatttgtatatagttccaagcatgatttaatgatggatttaatatagatagtgaatccattcccattaaccttgttaataaatgaaagctacttgcaaaacttccacatacaccacgtttatcaaccagattaccatagactatgttacaatatttagagtctacatattttgcttcggttaccaattttgcagctctattagctctttccatctcagatgcatttctccagtcaaaactatttaaaaaattcctgattactgtaagtgtatcttgagcttgtttgtaagaaatccaatctccatcggctattacttctatagggtcaagttttccaaagcctattctctgatatgagctacctgacaatgctgctgcataaaatcctagcccttccatacccttatttatataataatatttaccatctgctcgaagctcaactccatttggatttcctccatagagtaaattaaacttatttttttaaaacatattgtttaaatcagtacatttatatgttttttttgttcatctgttttatcaaatatattagtctttgaattttgtttgtattcttcagcatctttatctaacttttctattctcgactcaagtttcattatttcttcttgtgttaaatttataaaatttttaagcatattttcaagctcttcacgagttttacctactaaagataagtcctcagatactttctcttttttattagaatcctctttataatcctttttttgttctaactcttctaatttttcatcatttaatatttcttcttcaattttttcattagactctttagtgattaaagattctttttcatcatttgtatttagataagttgaattttcatctaacattgtacttttatttttatcttctataatgctatttttaatacctatttctatattagaaaagttattagttgtttctcttatttctgatttatataagttcttaattgcttcatttatttttttagtataaacctcttgtctatattttaaatctctaattctatcattaagttcttgcttttgtttcataatattagataaataagtgtcttttcctacagtttcatttttcttaaccatactttcatttattcttgtattatttatattactttcatgtctaaatgaatattgacttctatattgactagatattttcatttatttcacctctctaaaataaatttatgtttataaaaaccaacttaacttaattatattttatcatcaaaagtatacatttacaaatattagttaatagttttataggttcgagcattgttttcaacaaaaaatttttattataaattaaaacaataatttttataaatatcttatttgtattttataattcatatatttttactttataaattagcaatattgcagttttgctcttaagaaacatctctatcatacataagcatatactctattatgtattagtataaatatgccttttcttatcttacataagacctctttataaaggagactatcgtaacaaatatgtatacattatcacatatatatatcatcatataaaaaatcaaactttattaaaaaaattaataaattgctttaaataataccacaaaccaaatttgccatcaaaatcacattaaagtaacaaattaatggcaaatttaatacattaatagtatatagactcatagaatgaacaaaaaaactacacttatcttctaatcgtcttatttatttttgagatatttttaaatttcttttctttttttgctaagtattcgcttttattgtctgcaaatactgcttcagttttaagcctacgataggattcccatcttttaggcgaaagttcttgatgagcaatagcttcccagatagcacagcctggttctgaggtgtgagtacaattacgaaaatgacattttccgaaataagcttctatatctgcaaaacttttatctaaaccttctgaaacatcccacattcccaactctctcatacctggtgtgtcaataacaataccaccacctgaaattaaaaatagctctcgtctagtcgtggcatgtcttcctttatcatcatctatgcgaatttcctttgtatttaaaaattctcctcctagcagacaattaattaatgaagattttccaactcctgaagagccaagtaatgcaacagtacagcctgatttgatatacttagaaatctgtttataaccatctggctctatagatgaggtaactactacatctacacccaaggctatagaattaactacttgtaatttacgatgcacattgtcacataagtctgatttagtaagtactactactgggatagctccactttcccatgttaaagacagatacctctccaatctatgaatgttaaaatccttattcagtgacatgcacaaaaaaacaatgtcaatattagctgcaaccacctgttcctcatttacctttccagcagccttacgcacaaacaagctttttctatgaagcacatgatgaataatagcattaccatttttattattgcaacgatccaacataacgaaatcaccaactgtgggaaaatcagattgtatagtagcctcaaaacgcagttttcctgaaacctctgcaaacagtacaccatttacacatacagcttgataaaagttcttttcctgcgagataattcgagcaaggtataaatcgtgatattccatactttgagtaataaaattcctatttagaccatagtcttgtaaattgatttgtttcataccattcattctgtttcctccttttccaacttttcaatgattctttctagtgggaaagggggctgtgccagtggttttaatgcaattgacattaatttcactgaattatcatcagctgcaatacgattagaactaagatgtccacagcgtgtacaacgatgaataattgcccactcaccattttttctcacccacactccaataggttccatattagcatcacaatctgcagcacggtcaccaggaatgatatctacatgaagactatgtaaacaatgtggacaatgatttctatgttgtgtaccagctccttcaggaactacaaggcaaccacaatttttgcaaataaagttatccatacaggaattttcctgataataagctcgttttctatttttataattcatttttatttcctccgtatcttgtattttctacaaaaaaagtccacaggtatttatatctgcctttttatgtggtatacatatttacctacacaaaaacagaaaacccctgtggactagaaaatttagtatcttctatttcaacataattatattcaaaataatactgtgtaaaattaataaaagtgtagcagattaaagcccactacaccacaatttaacaaagtaatatgtaatattattatttgttgtctaatgttagttatctataaaggcagagtaagacacaacaatcaaatgtatcaaaaatacacttaaaaattctgattaaacagaacccatatgcgtctccaactatttatttgttggttaccattatatataactctgacatcaggcaagacactccttcactaataattattattaaaattttatcataaaatataagtatgttcaagtataatttaatatattcatatatttatgtttgtctcattttcttattctataaaatctagtggtattttaaaatttaatgttcacctagtattaataataaaaattaattgctattatttgttttctcattttatgcctattgctcaatttatctcacttaaattaataacaactgtcttttcatacaaaacctacaatcaagtttttccatatattctacatgaatagtctattttttttatataaaataacgttcatatttgtaaatttatttaattttcaaataagtatattgaataataagcaattctattgtattattgtaattgtagaataaaactaaatcggcaaaactagagaaatttagtgacgcaaagctatagggactaacgcttataaaataaactatgagttatgtcagccagttgccaaaaagagatattctttttgtttttatgaaagttttttagggggataataatatatatgtttagagataaaatggatagatgtacacatatgttgactgcttatattggtagttcatatgattattgtgattttatagatacacaactagatgattttatactagagtacggagaaaatgtggtagaatcttgtttgcatcaagtgatggtattagtaagtaagtataattaaatagatttggttttctagagaaccctttttagttttatctactttaaatagccttatgttagaaagctaattaagatagatttctagtattcataattttattttctatttaaaatacatataataaagatgtaaatttgtatcaaataataaatatgagaacttaaattctcttatctatgtgaaaataaacatctcttaaaatgaaattctgtaaacataaatgattttttagtttgaaggattagattaacaaaattataaatttgcaaataagctatattaaaaaatataataattttttatataacttattcttttataacttttaattttaaaagaggagaatgtatataagagtattcaatgtactagaaaaaatcaaaagaaatattagaagaaatggatattgagtaatcaaataaaagattttgatattacaaatgatatgtttcaagaaagcattcctatcacaacaaaaactattcttgaagacatgccttcaaatgatgaattaaatcatgttttttcaaaaggttgtgaacgaaaaatgaaaaagagaaaaattgtattaatcacactactattaataggtgttttgttattaggaagtatcctatataatctttttttagtaaaagcagctaatatttcaatgctaaaggaatcttggaattttgatataccaatacctaacaaagaaattgaagtatttgatactcaagatagtattaatggagatggacaaagttattttattcaaggattttctgaaaagaatttcaaaaaagtttttaatttaaaaggtggtatagttgtaagcaaagataatattaatgaaatagaaaaatatattgataaatttaaaagagattctgttaacattaataaaagtaataaaaataaaattgaagaagattttaaaaaatataagttagaagttaaaaaagatgataagtatatatataagagaaattatgaaaactatgtagttttaattataaaaaaagatgaacaaaaattatacagtttaatatggaatcagtaggtacatatgtattattaagaattataaataataaaaataaattttagtcaatctacaaaaaccttttaaattgtctggaaatcacctcctcatttgttataaaaacatacaacaaatgaagaggtgattttatggtttttaaaaaaataattataagtggatatgtgctttcacatgtttatcaacatttgtaatgcctatatttgctaatgaattataatataaaaatattaaataatattcaactatagattatgtaaattatcctatgaaaaaaataagttgtataaaatctggcaactgtagattgacgatttcttttaaaattacaattataataagttttatagaattaaaaataaaactttagagatttttgataacattgtagactaaatttgccaccgaaattactttacagtggcaaatcggtggcaaatacaatatattattagtatataatctatataaacattactattgcttgattatcttagctacagtttccacatgtgtagaatgagggaacatatctacaggttgtgcctcaacacatttaaatccgtgaacatttagatagtctaaatcccttgctaaagtagaaggattacaagaaacatagacaattctttccggattcattgaaacaatagtctctaataccttttcgtcacatccctttctaggtgggtctacaactactacattggcagtcttaccctctctatacatcttaggtacaatttcctctgcctttccaacataaaattcagcattatgtatattgtttaatttagcatttatcttagcatcttttatggcatcatctataatttctattccataaacctttttagccttttgtgccaaaaataaagatattgtacctatcccacagtaaatatcaaaaacagtatcagtatcatttaaatttgcatattcaagagccttatcatacaatactttagtttggacagggtttacttggaaaaatgataatggtgaaatctcaaacactaagtcacctatataatcgtttatttttccatctccatatataactatattttctcttcctagaatagcattcgtatctttttgatttacatttacaaccaaagtcttaaatccaggtatattttccttaagcactgaagctaattctttaagatatggaagtttgtttccatttgctactaatacaaccattacttctttagttgtaaaacctatttttgttactaaatgcctaatcaaccccgtgtgagtcttttcatcatatatacttaccttataggcccttatatatgtttttattattttaacaattttatcatttatctcatgttgtattacgcatttttctgtcgatattacatcatgagtcttctttttatagaagccaataattggaataccattattcttttgtattggaaattgtgctttatttctatatctatatggattatccattcctatagtgtcatgaacttctacatcctctaacttacctattctcgaaagtacttgtttaacttcatttgttttcatttcaagttgtttattataatctaaatcttgtatctgacaccctccacaatccctaagattgtcactacacactcttttcaccctgaatggagacttttctattatctcaacaatatctccctcagcataatttttctttactttattaatcctaactttaactttatcatgtattaatccgccctctacaaaaactgtaataccattgtactttcctactcctactccgccttgaccaatgtctactatatctacaatatacatctcgtttttcgaaagcataaatcaccctccaatcaatctattatatttaaatctttacaaacttttttctttaaatttatattaaaatattgctattaattaaactatattttttactaagctacaatattttattttaccaaaaaaaaaggagcttataaagccccttagtaaataaatttattatttttcttataaaactctagttgaacctctatataccacgcctcttgatgcatccacagttacaacttctccatcttttactagatttgttatatcagttgcagacacaataactggtatatctaaatttatacctacaatagctgtatgtgatgtcattccaccattctcagttactacagctcctgctttttctatataattgttcatttcagcatcagtagcagtagaaacaagtatgtcgccttcattaaagtctacacaagcatttccattctttattatacgaactttaccttctaccgtttgagtacctacacctataccttgcacgatttcttcgcttattacatgaacctttattaaattagtagttccacttactcctactggtactccagcagttataactactaattccccattatctatataatcagcttgtctagctgcctcaattgccttttctataacttcatctgtatttcctgcaacagaagacttaactggatatactccccatgtaagagctaatttattcatagtcttttcattatttgtagtagctattattggagattttggtctaaatttagataccattctagcagtatatcctgaagaagtagatgttattatagctgatgcatttaaatctactgctgttgtacaagttgcatggcttattgcatctgttacagtaacattgttagtaccattttcctttagtaatctatcataatctaaagtctcttctgttctttttgctattgtagccatcatttttactgcctctacaggatattttccagcagcagtttctccagataacattatcgcatctgttccatcatatatagcattggcaacgtctgtaacttctgctcttgttggtcttggatttcttatcatagaatcaagcatttgagtggcagtaacaactggctttgctaattcattacatttttttatcatcattttttgaactattggcatctcttcagttggtatctcaacacctaagtcacctctagccaccattataccatcagaaacttttaatatttcatctaggttctctacaccttcttggttttctattttagatattatttgtatatcagttgcattattgttctctaatacttctcttattgctagtacatcagatgcctttcttacaaaagaagcagctatataatctattccttgacttattccaaactctatatcacttatatctttaggagttattgctggtaaatttatcttaacaccaggtacatttactcctttatgatttttaactattcctgaattttcaacaacacaaactatatcttctccatttatttcttttactcttaagccaactaaaccatcatctattagtatagaatctcctgatttaacgtcttcagcaagacctttatagcttactgtacacatttctttagtccccataatatctttcatagttatagtgaacttttgcccttcttctaaaaatacctctgggtcttcaaagttacctgttctaatttctggacctttagtatctaataatatagcaactggcttatttaatttttctctaactttctttgccatatcaattctttctttatgttcttcatgcgaaccgtgagaaaagttaaatctacacacatttagaccattttgcataagttgagttaaaatttcctcactttgtgatgctggacctagtgtacaaacaatttttgtcttctttacattatttaacatatttgctcctcctgagatattattccacagatttatttttaatactaaaacttatatagataatatttttgccatctcataagcttctttatcaaatactttcttttgagctaaagcttcacttatttctaaatcaattattttgttttcttttattcctacaactctagctgattttccatctaataataattctactgctcttactccaagtctacttgctagtattctatcagatacagttgggcttcctcctctttggacatgccccaatacagtgactcttaaatctgctcctgactcttttttaagttccttttctaaatcactagcacttccgactccttctgctaaaacgattatactatgtctcttacctcttttttgagtagtctttaatcttagagcaacttcatctactgtaatttctacttctggtactattatagtttccgctcctcctgcaagacctgcatataaagctaaatctccacagtgtcttcccataacttctactatgttaactctttcatgagatgatgatgtatctcttatcttacctatagcatctataatagtattcattgcagtatcaaatcctatagtataatctgtatatgctaaatcgttatctatagttcctggtatgcctatagctgggaatcctaagtcactaagtttttgggctcctgcaaatgaaccatctccaccaattacaactaagcaatcaattttatactttttaagaatttttactgcttttaatctaccttcttctgttttaaattcttcacatctggaagattttaatatagttcctcccctgtgtataatatctccaacagaagataagttcatttcagttaaatcttcttctagtaatcccttatatcctctattgattccatatactttgcatccataatatattgctgatcttacaaccgctctaatcgcagcattcattcctggagcatctcctccacttgttagtaatcctatagttttcattttttacctccttggattttatgtcaattttttattataatcattgttattgtattctaatggactttttttgtccctatatcactttttaatcccatcaagactaaaaaaattaaatgtccttaaatgtccattttgtgatattatatcacaaaacggacaatatttttcatattattataatatatttagatttttatataaaaaatcaagcttttacttttatgttatctttaggaagtaactcttctaagttatttataaattcatcacatatacaagtcaatgccccggtcattttatatgctttacgtttaccatttatattttcatccatagggtacaagtatatactgtcattacctggatattgtttggctatttctacaatattattagttgtatcagtatcagacatactatctattttcaaatacaattttttaccactttctggcttaatattttctacatttctagttcttcctgaattgtagtttctatctgcaaagtcagtatcatcatttatatcttttatctctctagctataagttttgcattttcgccttcttttatacttaatgttccttttacatatattatattatcttcattcaaaatgacattatacttttgtaataattgaggaaaaactattatttctatagcaccatacaaatcttctaattcaataaatgccataatttcatttcgttttgttgttttaatagttttagttacaatcattccacccattataacatctgtttcattcatttgtaggtatgactcttcttcctcttttaatgaatttaattttccattatccatagatgttttttcttgtagttctttttcaaattgtgataaaggatgtccacttacatacattcccaagacttctttttcaaggttaagtctctctctttcttcatactcttgccttttaggtaaactgtatatttgttgaaaatcactatcttcctcactatctccaaaagcatcaaataaagaaatttgaccttgaacatttttctttctatccatagatacactttctaataaactttcataaccagccatcagactagctctattttcacttatattatcaaaagctccacattttattagactttctattactctcttatttgtatctttttggtctaatcttttgactaaatctactaaatctacaaataatccattagattctctttcagcgattatattgtttattatatttacaccaacattttttacagctgctagaccaaatcttatattgtcgccttcaactgaaaactttgaaaaacttttgtttatatctggaggtaatacatctatttctagtgctttacattctcttatatactcaactaccttatcagtatttcccattacactggttatcaatgctgccataaattcaactggataatatgtttttagataagctgtctcatatgctaaaaccccatatgcagctgcatgtgatttattaaatgcatatctagcgaagtctatcatatcatcaaatattttattagctatttcctcttctacaccatttctgatacaccctgcaatttctatattaccatcttcatcaaatttaccatgaataaaatattgtctttcttcttccatcacgtccatctttttcttactcatggctcttctaactaggtcacttcgtccgtaactataaccacctaaatctctaacgacctgcataacctgctcttgatataccaaacaaccatatgtaacttccattataggctttaatttttcatgtagatatgttacatcttttgggttgcttttattttttatatatgcaggtatagaatccattggacctggtctaaatagggatattcccgctacaatatcttcaaaattgtctggttttagctgtttcataaaacttctcatgccagcactctccaattgaaacacccctagtgtatttcctgatgaaagcatttcatatactttcgggtcgtcataatccatctttgaaaagtctattttttctgtgtagttttttataactctatttttttctattaaatcaagagtatctcttataactgtaagagttcttagcccaagaaaatccatctttaaaagcccaagttcttcaagtgttgtcatagtaaactgtgttgtgattgcatcttgatgtttgtacaaaggtacatattcatctacgggattttttgatataacaactcctgctgcatgagtagaagcatgtcttagcattccctctatctgttttgatatatttattatttcttttgtttccgggtcttggtcatacaattctttaagattaggatttgtatctagggccttatctattgtcattcctaaagcaaatggtatttccttggctaccttgtcaactttattgtagcctatatccaatacccttccaacatctcttattgcagcttttgcacccattgttccaaaagttattatctgggctacatggtcatcaccatattttctctttacataatctataacttcttctcttctctcataacaaaaatctatatctatatctggcatggatatacgttctggatttaaaaaacgctcaaataatagagagtactttattgggtctatatcagttatcttaagtgtatatgctactatcgaaccagccgcactacctctacctggtcctactataatattattttctttagaaaaatttataaaatcccaaacaattaaaaaatactctacataacccattttttcaattacatctaattcataatttaatctctctagtatctcattgctaggattatcatatctctcttttaatccattaaaacacaactcccttaaataagtttctggtgtatatccttctggaacatcatacttaggaagatgtatagtattaaaatcaaactccacattacacatatcagctattttcacagtattgtcaatagcctctaatgcgtatggaaataattcttccatttcttctcttgattttaagtaaaactcatcactaccaaatctcattctatttgggtcatttaatgtttttcccatttgaatacacataagaacatcatgtattttcgaatcttctttatttacatagtgaacatcattagtagcaactagtggtataccagtctcttttgataattttactaaaccagagtttacttctttttgctcaggtaaattgtgatcttgaatctccaaaaagaaattttcttctccaaatatgtctctgtagtcaagagcaaattgttttgctttttcataatttctattcattaaagcacgtgctacatctcctgcaaggcatgcagaaagtgctataatccctttgttatgttttttaagttcttccatgtcaactctaggcttatagtaaaaaccttctacgtatgaagttgaaactatttttattaaatttttatatccttccatattcttagctaacagaactaaatgtccttgatatttgtcatagtttgggtctttatctctcaatccacgtgcagctgtatagacttcgcaccctataattggctttattccttcttttatagctgttttgtagaaatctataacaccaaacatacaaccatggtcagttatagctattgagctcatgtttagttccttagccctttttataagttttttcaccctcgaaaacccatcaagtaaactatactcagtatgtacatgaagatgagcaaaatctttgttcattaaatcacctcctgctttataattttaattttaccacaaatatatgtcctaaaacaaaaacagagacttttatctcaaaataggaattaacttcaacatataccattatatgttataaattaatgcttattctgagattgtcccctcaatttattgctatgatttttttttcaaatctgttgcaatttcttctatttttctaagtctatgattgactccagattttcctattggtggttctaacatctctccaagttctttgagagtcatatcctcatactcgattctaatcttagctatctcttgtaaattttctggcaaactgctaattcctatagtctcttgtatgagcttaatattttctacttgtcttactgctgcatttactgttttagaaaggttagctgtctcacaatttactatcctgtttacattatttctcatttcttttactattttagtattttgaagacttaaaagagcgtggtgtcctcctataatactcaacaaatctgatatttgttcactctctttgatataaacaacgtgattattttttctagccacaattttactattaaaacctaaagagtttataagttcttttagagaatctgcaaactcctcattattagttacaaattccatatgatagttcttttctgggtcgcttatagaacctccaccaagaaaagctcctcttatgaaagctctcttacatccttcatgcttaattaagttctctgaaattttgtttatagtaaaaaagccttctttatcttcaagtatacctaacttttttaataacatttctgaacccatttcgcttgttaccattaatacataactgttatttctctttagcatttgattcttatttactgagattgtagtattgatattaaaattcttttttaataatttaaatactttacgggctattgaatttaactctgttgttatctttagatttagcttcttatatccaacgatttgtatacttccccctgatttaactagagctgataattcagctatattacaacattcattcccagatataactcttgctagttcatttttggtttcagttgaaaaagacatatctatcacctattaactaatttttctttaaccttttttttatttcttgtaaggcaacctttattatctccttttcatcatcatacctagctaggtctaccactctatctagatggataaatttagcatcaataaagccttcctctttttgtggaatagtatccatattctttgcttgcatcaaataccaaaaaactgttttatgaactgctctattttcatcccagttttctttgaatgtatagtgtatttcacctaaatatttcaatatatctgcttttactccagtttcttcacttacttcacgtaatgctgcctcttggttattttccccttcttctacttttcccttgggtaacacccaatctccattgaacttccttagtaaaagaatcgtattgccaaacaggactacaccaccagcactaacctcttctctcatcgatgttcactccttaaaactaacataatgataaggatttctacacaattttttaaaatccttttttactaacttttgttgtaattatgatttagggctaactcaataactatgttagatatatactttgcatcatgtcttatataattattttttatttcaattaaattcttctctacggtttttatacccatctcttttaatttatctttttgctttttatctaacaagacttgctctgctccatcttgtttatataagtcaagcatttcttctggcaatatctcattatttgcgattacataatctattaaattctcatcagtgtgctttactatagcattaacatgctctaatacattgtacccttctgtctcacctggttgagtcattatatttgctatatatacttttggagctacagacgatttaatagcgtctacaatcccctctacaagtaaattgggtattatactcgtatataagcttccagggcccataattataatgtcagcatcgtaaatagatgcaataacatcctttaatggtttgacatcttttggatttaaaaaaattttatcaatagagcttttttgaatttttgactcttcaggtatactagattctccatttattatattgccattttctaatttggcaactaaatttacatcttccaaagttactggtaaaactcttcctgttatagcaaaaatttcacttaatttatatacagctttttcaaagtttccatacaacccattcatagcagccaaaaacaaatttccaaaactctgaccttttaaaagcccttctgtaaacctatattgcataacttcattcattgttggctctatatttgcaagtgctaatagacagtttcttatgtctcctggtgggagcattcctaagtcttctctcaatacacctgaacctccaccatcatcagcaacagttacaattgcagttatattttgcgtagtgtgtttaagacctcttaaaaatactgattgaccagtacctccacctatcacaaccacatttggttctctattttcaacaatagacctttgaaatagttttactttttcattttttgcttttttatatataaataacgatacaattaatgcaatccaacctaaaattcctacaataataagtaatttagccatgtttgcctccattatcgcaacatagagtctctatgtttctttacaactctatatcccttattagataaatcctccgctataagatttgttatagtaactgacctatgtcttccacctgtgcatccaacaccaattactagatgttgttttccttcatctatatattgaggtactaaaaaatgaatcatatctaaaagtttcacataaaattcttcactgattttagaattcataacataatctctaacttctttatcatcaccagttttagctcttaactcttcaacataatagggatttggaagaaatcttacatcaaatactaaatctgcatcagcaagtataccatgtttaaatccaaaagatactacagaaatagttaggtttggattatcttcaccagaagaatatattttctttatttcttccttaaggtctttaggtttcatgttagttgtatcaattatacatgtagataactcctttaaaggttccattatctttctttccatttttataccttctggaatctgcatatcttttgccaatggatgatttcttcttgtcattttatatctctttaacaatacatcatcattacagtccaaatataccatttcatattcataattttctttttctaaataatttaagctttcatgaagcgcttcaaaaaactttctccctcttatatctatccctagagcaactttatcaatacttgaatttggttgataacataattctgcaaatttagttatcaaagcaggaggtagattatctacacaataaaatcccatatcctctaaagctctcattgtctcactttttccagatcctgaaagacctgtaactataacaaatttcattgctaactcctcccttttatcttatgtttattatattataatgttttctactaacgatatatccagattagagtcagatatagtcttcatagctagtttaaaatcaccaactctttctggacaatgtgcatctgagcctattataaatttattttctagcccttttattttatttaattgatttacattcaaaaaagaatggctactatttatttcaagtctagtatttgtcttttttgctgtctttgctacttcttctatatacacatcgcctttatctcctggatgagtaattataaaaatatcattattacttatcgcatttattacagcttttgtattgtattcttttgctttttcagttttaaaaatatagttattacaatgatttaataagcttcttaatgatgttggagtagaaccaaaatgatatccagccataatataatcaaaatctctaataaatttatcatccatatctatattgcctttatcatctaatatgttacactccatacctaaaagtatatttatatcattgtacttatcatttaaataatctacttcttctctcattttgagaatatcttttttctttacaccatatgcaatatgtttatagctatggtcagatattcctattgtttttattcctttagaaatggctacctttacattatcttcaatagtccctttgccatgactatataatgtatgtgtatgataatcagccagtattttcatttgttaatcctctccaagtattttgacttcttcttccaacataaccccaaacttggcatatacagcactttttataacatatattaaatccaaaatatctttagcacttgcttctccttgattgactacaaatccacaatgcttctcagatacttgtgctcctcttaaagtaagacctctcaatccagtttcttctattaatttacctgcaaaatatcctgttggtctcttaaatgtacttcctgcactcgcaaaatttaatggctgtttagttattcttcttgtcgctaaatcatccattaaactttttatttcatcataatttccttcttgtaattctagttctgctgataaagctatatatccgtttttcgatattatactttttctatacccaaattccatctgttcatttgataattcaaatatattgccttccatatccatcagtcttactgacttcactatgtccttcatttcaccaccatatgctccagcattcatggctagtgctcctcccaatgtaccaggtattcctgatgcaaactcaaacccttttaattcttgcttttggagagctttacctaaaactgataataaagctcctgactgagcagtcatcctagtatcatttatctcataagaattgaaattatcagctaattctattaccactcctcttattccaccatctttaattaaaatgtttgaaccatttccaattattaaatacggaatagattcttcttttaccaacttaagtacattttttaattgttcttcagttctaggtctaactaatatatctgctggtcctcctaccctaaatgaaatatgttttttcataggttcatcgacttttatatcctctttacttaatatatttaataaatttatatatatatcttgattattcattgtatttcctcccaaattatactgaactttagctgtcattattatttaaattacattagtatatagtattaactatattcaataatatatgattttgcttatcatatggattttatattttaagcttcttaattacaaactatattcaataaatatataataaagtaaaaaaaaaaaaataacaacatataaaagaatataaataatttaaaaaaagcatcaatatcactgatatcaatgctttaaaaggcaatttaattcgtattatttatctaactatttttgacatagcaaagataataaatccctccaactactatggaacctccaacgatatttccaagcgttacaaataccaaattagttataaattgaaccatagttatatttgctcctaatgccattcccattggtataaaaaacatgtttgcaacactatgttggaatccgcataatacaaataacattattactgtccaacatgaagccaattttgacattatatcttgagatgctgtagccatccatacagctaaaacgactaaaatattacaaagtattgcttttaaaaacattgatgctatagttgaattaaccttagcttctgccacagctatagcttttgtagctgcatctcctgtcaatgtagaagaataaaacacaagtgcaactagcagaattgaacctactaaatttgcaaaataaaccagtccccagtttcttaacatttttcctaatgttatttttttgtccataagtgcaatagccattaaggtgtttccagtgaataattctgctcctgccaccactacaagcataagacctactggaaagaccatagcacttaaaaagctagctacccctgggtctatcttgccaaaagtttgactaactatcatactccccaatgccccaaaacctataaatgctcctccaaataaacctaatagaattgcattttgtgtcgaaatgtttgcttttttaatgcctgcacttatagttgcttgtgcagtttccccaggtgtcaagaatcctttactcataaatccttcccccttaaaaattatactttcccttgtctttttatggcaataattatataataacaatatgatatataataaattttattaacataaaaaatatactatatacttatatatacttgtctcatataattatactatttattatataacaactttgttaatttcgaaataatttatattgaatttgaaaaatttaccttttgattatttattttactttttaattattgaggtattatatataatagatatatgtttgtgttattatatataattacttattttaataaatatttgaaggagggaattttatgtttgatatatcatttttcgaaatgtcaatatatgaaatagcagttactacaatatatataattaatttcatggttatactaaaccttatctttagagaaaaaagaaacataaatacaactttaacatggcttcttatattagtattgattcctgctcttggattcatactttatatagcttttggcagaaatatttcaaaaaacaatatgtttagattgaaagaaaaggatgataagataatcaaaagtaatatactagatactcaggttaaactccaatctacatctgaaattgattcagatatacatcaacataaggatatgatttatgcattggctaattcaaataatgctcattataccaataataacgatgtgtggatttatgctgaatctagtcaattttttaacagtcttcttgaagaacttaaaaaagctaaaaaatatataaacatacaattttacattttcaaagatgacaaaatcggaactgaaataatagacattcttatagacaaagctaaagaaggtgttgaagtaagacttttatttgatgcagttggtggtagaacactaaaaaatagtacactttccagacttaaagaaagtggtgttaaagttggaagcttcttcccatcattcttgaaaattgtaaactttaacttaaactatagaaatcaccgaaaaattgttgtcattgatggtaaggtaggatttgtaggtggatataatgttggtgatgaatatttaggtagaaatccaaaatttggtctatggagagatacacatactaagcttactggtgattgcgtaattgacctaaatatgagattcatccttgattggagatatacaactaaagaagatttagatttagaaaagtactttatagaagaagatacaaattctaatcatccttctgaaaatattgggattcagatagtatcaagtggtccagatatatcagaacttgatgagattaaatatggttaccttaaaatgattcagaaagctagaaagtatatatacatacagagtccttatttaatacttgactcaacttttatagatactttaaaaatagcttgtttatctggtgttgatgtgagagttatgattccttctaaacctgaccatccctttgtatactgggcatcatattcatatgctggagaacttttaaagtttggagctaaaatctacacttatggtcaaaatgcatttttacatgctaagacaatagttatagatgactctatatgctctataggaacagctaatatggatatcagaagttttgagcttaatttcgaagttaatgcatttatgtactcttcaaaaaaagcattggaacaaagaattatatttgaaaatgatattttaaattctaaggaaataacattagatatatataattctaggtctacttatataaaaatcaaggaatcaatttcaagactattatcagcagttttataaatcttttattttataaaaattttacattttggtttattttttaaagttttttatatgtattattttttttttattgaatttagctcattttttttattttttttaactattctgaattattttatattataatagactagtatagtttttatttttaataggtaacttttttgcattgtttttataaataaagaaattgttgtatattattctttctttattgttctggttttgttcacccacataatgttggggtcaactcatggttaattattttatgaaaaataataactttaaaaagaaaagggggatttgttatgtgcgattttatttcacacaacaagcaattatttgacgaactagatatatttattgactctcttacaacaaaggaaggtgcgttaatacaagttctacatgaagcccaaggtatatttggatatcttccaaaagaagttcaacttcatgttgctagaaaacttggagtagctcctgcaaaggtatatggggttgttacattctattcttattttactacagaacctgtaggtaagtataaaatcagtgtctgtctaggaactgtatgttttgtaaaaggtgctgacaaaatcttaagtgcttttgaaaaacagcttggcataaaagttggagaaactactagtgattttaaattttctttagagggtttaagatgtttgggggcatgtggtttagctccagttgttactgtaaatggtaaagtttatggtaaagtgaaacctgaccaagtaagcgaaatattagatacttatagagaattagaattgaattgttaagaggggtgaataaataatgcgtaaagtaaattcatttgatgaattaaaagttttagctgatgagctgaaacctaatcttagcttaagaaaaaattattctaaggaaaatgtattaagaagagaattacttgtttgttgtgatactggatgtacctcttcaaacagtctagaaatagttagtgaattagaaaatgaaataaagaaatcaggaatccaagataaagttagtgttcgtttgacaggttgttttggtttctgtgctcaaggtcctattgtaaaagtttatcctgataacgttttctacgtaaaagttgagccatctgatgctgaaaagatagttcaaagccacttaattagaaatacagttgtcgaggaattattatatgaggaagaatctttaagtaaaaaagttgaagaacaagaagaaatgtctttctacaaaaaacagttacgtatagctttaaaaaattgtggtcttatagacccagatagtatagaagaatatattgccaatgatggttatttagctctaggcaaatgtttaacttctcttactcctcaagaagttattgcagaggtaaaaacttctggccttcgtggtagaggtggtgcaggtttccctactggctctaaatgggaagctgcttcaaaaaatccagctggtccaacagataaaaagtttgttgtatgtaatgctgatgaaggtgacccaggtgcatttatggatcgatctgtacttgaaggtgaccctcatagtgtactagaagctatggcaatatgtggatacgctataggttctgatacaggatacatatacataagagcagaatatccaaaatctatagaaagattaaaagtagccatagctcaagctgaaaaatacggtttacttggcgaaaatatcttaggcactggatttaactttaaattagaattaaaatatggtgcaggtgctttcgtttgtggtgaaggtacagcgctaatgcattcaattgaaggtagacgtggtgaacctagaatgaaaacttatagttcttctaagagtggtctatggaaatctcctacttgcttaaataacgttgagacttttgctaacatacctgcaattatacttaagggtggagattggtttgccaacttaggtactgaagattctagtggtactaaagtctttgctcttggtggaaaagtagaaaatgtaggacttgttgaagttccaatgggtactactttaagagatattgtatttgaaattggtgggggaatccctgaaggtaagaaatttaaggctgttcaaacaggtggaccatctggtggatgtataccaactgaacatttagacactcctatagactttggttcattaagttctatcggttcaatgatgggctctggtggtatgcttgttcttgatgaatctgactgtatggtagatatagccaagttcttccttgagtttactgttgaagaatcttgtggtaaatgtacaccttgtcgtataggtactacaagattattagaaatattaactaaaattacagaaggtaatggtactctacaagatttagatgacctagaaaaccttgctgaaactatacaaactgcttcattatgtggtcttggtaaagctgctccaaaccctgttttaagtactcttcaatatttcaaagatgagtatatagctcatgttgtagataagaaatgtcctgctggtaaatgtcagaacttactttcttactttataacagatgactgtaagggttgtacaaaatgttctagagtgtgtcctgctggttgtataacaggttctgttaaggaacaacatacaatagatacttctaagtgtctaaaatgtggtgcttgtatagataattgtacatttaacgctataatcaagaaataacttatttggaggaggaataacaatgagtttagttaatttaactattaatggcaaacacgtttcagcacctagtggaacttctatcttagatgctgcgaaattaataaatataaaaatacacaacctttgtcatttacatatgaacgaaatagataagcttgacacttgtgcttcttgtcgtatttgtatggttgagacagagagaggcttagttccagcttgtggaacagttataaaggaaggtatgaaagttcagactaatagtgctaaagcattaaatgctcgtagaactattgttgaattattgttatcagaccatccacaagattgttttgtctgtgaaaaaaatggagattgtgaattacagactatagctgctgatttaggagtaagaaaaataagatatcaaggttccaaatcttttgcaggtaaagatacttctactaaatctttagttaaagaccattctaagtgtatattatgtagaagatgtgagactgtatgtaatgacatacaaacagtaggagcattatctggagttaatcgtggatttaatactttagttagtacattctttaactctgatatggttgaaacagagtgtacattctgtggtcaatgtatatctgtctgtccaactggagcattaacagaagtagataatgtacctaaactttgggatgttttaaataaaaaagaaaagactatagtagtgcaagttgctcctgctgtaagagttgctattggtgaagagtttggattagaaccagggtcaatctctacaggaaaaatggtagctgctttaaaagcacttggatttgaacatgtatttgatacaaactttggtgcagattttactataatggaagaagctactgaatttatagaaagaatccaaaaaggtgaaaatcttcctatattaacaagttgttgtcctgcatgggtaaacttcttagaacacaattatccagacaagttaaacttagcatctagctgtaagtctcctcaaggtatgtttggttctatagctaaaaactactatgcacctaaaatattaggaatcaatcctgaagaactttatgttgtatctgtaatgccttgtgtggctaaaaaatatgaagcttcaagagaagaattaagtgaatctggaatactagatgttgacctttctataactactagagagttagctaaaatgataaaagaagctgctatcgatttacctaatcttcaagaccaagattttgataatcctctaggaaaatctacaggtgctgcatctatatttggagcaagtggtggagttttagaagctgccctacgtacttcatatgagaagataactaataagactttagataatgtaaacttcactaatgttagaggtcttaaaggaattagggaagcaagtatagatgttgatggaactacagttaatgtgtgtattgtaaatacacttaaaaatgctagaaagattatggataaggtcagaagtggagaatgtaaataccatatcatagaagttatggcatgtcctggtggatgtgttggaggtgctggtcaaccttatcaccatggtaatactgaaatagttgatagacgtgcaaatgcgttatatgaaatagatagaaataaggctattcgtaaatctcatgagaatcctgatttacaagctatttataaagacttctttggagaaccaaatagtgatgtagcccataaataccttcatactcattactttgataagagttgtgtctatggagagtgtccacaagaatgtgcttgtgaagaagctaagtagtcataacaaagtataaaatttattcttaaaaaaggattgtcttaaaatacttttacgtaatttaagacaatccttattaatttcacaaattaaattatatttctaaatagacttattctttaattaacctatctattaattaaagaatacctgccattctcataagttgttttgcatttgtagttttacatcttccatcttttatcttatagtcaaaatgaattttatcgtctacatagtactctgagaaatgatagtttacaacttcaacatctccactacctgaaaggtcacatagctcaaagtcatgtgttgtcaccatacttataacccagggttttgataatttctttactgcctcacttgctccaataattctatcagcagagttagttcccttaaaaatttcatctactagaaccaacattggcagttcttttaaactatattgaatcattgattttattctaagaatctcagcatagaaagttgatattccttgacttacatcatcttgtattctcatagaagtaaatatagccatacaggtcgcatcaaaactcttagcgcatactggagcacctgcatatgccagcactaagtttacaccgatacttcttaaaaatgttgtctttccagacatatttgaacctgtgataatacaagtctgagaatttaattgtatcgaatttgctatgacacttttttctgctattaatgggtggtatacctcttcaactttcaatcttggagtatcttcatattttattactggaaaacatgtattttcctttacatgagaaataactgttaaacttattagagcttcaaattctccaatagattcaaaccaatctctaatttgatttccatatatacctttccatcgctccaaagcttctgcacaatgatagttccacatcaaaacaccacaggcaattatatatagtatctgattataccttaggtttacagcatttcctattgaatttaattgtttaacacctcttgaaactccacttcccttagaaagtttatcttgtaattctttcaaatatgcactctcaaacgtctctttttctaaaacctcaaacattttttcatatacttgtatacttctactaaatgaaaataatggagaaagagtttgcataagtcttggatatccaaaaccactaaaccctaactggattataaaaagtaaaaaaacaggtaaaacaggtaaaaatcctaacatacaaaatataaaagataagattgttgcagttggtagaccccaagtaaaaatatgcatccattttggtatatacacattcttattttctccatactctataaacgattctatactactatctgaattatttttttgctctttaccaattatattactgagtatttgaatatgaatagaaaaatcatcttttgataaaagttcttttatagccctctgtctttctaagattacattctcatctggattttcattccacaaatatttggctaaaaaatttttcccataagatgtattagctacacagatatattgatacaatgatgctcttccaaataagtctaaatcttttgcttgcgaattttcatcttttaagtattctttaccatctattttaaattccttccaaccatctccaaatctcttaatatacttatttaatacttcgctcttacttttaaaatatgtttcttcttcttttactttactatgaataactaagagtgctataaatattattattgataaaactccaacaaaaatacctactatatttttattgtaaaatccaatagcaaaccctgctatcactatcaaaaaagatattaatcttgctgtacttatgttatttgactttttacttaagagcaattctttttcagtactactttctaaaagtttactaaaatattctattcccataaaaaattccaactttcttgttatataatgaaactcaaatataaaattaatctagtattattataatctaacactgtactttaaattatccttatataatatatcttattaataaacattatatatatacaacttgattttaatttataaggtgtaggacataatcctaatcaatatttaattaaatgatgtgtagttcactattattcagtactacttagtatcgattaattttgataattttttagtaaattcttgagctgcatcgtatcccattcctctttgtctaaaattcattgctgctacttctaatatcatagcagtatttcttccaggtttaacaggtacaactaatttctctacattaacaccaagtatttcttcgtattctttatccagtcctagtctatcataatacttagtttcatcccaagcttctaaatgaactactaaatctatcattttagaatttttgattgcccctactccatataaacttctaacatctattattcctattcctcttatctcaagaaaatgtcttattagttcaggtgactgacccacaagcatactttcatctaattttcttatttctacagcatcatctgcaactaatctattacccctttgaatcagttctaatgctgtttccgactttcctatactactttcaccttttatcagtacacctataccataaatatctactagcaccccgtgaattgttgtgtgtggtgctaacttattatccaaatagtttgacagtctatttataagtctagtggtatttctatttgtgctcaaaagtattcttttatattttttagccttttcaattacatctggcttgatttccaagtctctagaaattattaacgctggtatttcatatgagaaaaatctatctagtacttcttctcgaatatgactatccattaatccaaaaaaattatattctgtctttccaactatttgtattctttcatatgcaaaataatcaaaatatcctgcaaactgtaatcctggtctatttatatcttgagagtagacataataatctacatcatcaggcatgtatactacttttaacttcaactcttttattatctctcttattgatactttattgctagtttccattaattttcttcctttctaaaaaaattataaacattatctgcaatgcttttattcattccatctacttctaaaagttcttccatagtagctttttttatagcctctacatctttaaagtgatttaataatgatttctttcttttttcacctattccttgtatatcatctaagatagattttgtcaaagctttatttcttagacttctatgatatgttattgcataattatgaacttcttcttgtatactagcaataaatctatataaattagttgttttatctagttctatttctttttctttgcatatcaatcctttagttctatgcttatcatctttgtacattccccaaagaggtatatctacatcattgagttctagtactttttttactgcactaacttgtccttttccaccatccaacaatatcaagtcaggtaaatttccatgttttaatcttctatctacaatttcagccatagaatcataatcattaggtccaataactgtctttattttatatctcctatattccttcttatcttttttagcattcgtatacactaccatagaaccaatcgaatctacaccttgtatatttgatatatcataagcctctattcttattggcaacttttctagatttaatatttgttttaattcttccaatgctccaatacttttttcatattttcttttattcatatcagaaaatttttcaagatattctacagcatttttcctaaccatttcaactaagcttttcttctctcccttttgaggaactcttattgttactttttgcccctttttagatgacagccattcttctaatatagaactatcttctatctcatcttctataattaattctttaggtatatactcttgttcattataaaattgttttacaaatgaacttaatatagaagctcttggactatccattacaccttctaatataaaatgttccctacctacaatcttaccatttcttataaaaaatacctggacacaagcttcattatgagctcttgccattgcaaccacatcttggtttaagtcacttacagtagcatctattttttgtttctgtatcatctcttcaaggctctttatcttatccctatatacagcagcctcttcaaatctaaagttcatagaactctcattcattttttcctttaaaagttccatcaatttttcttctttaccagataaacacattataatctcttctatcatttttccatactcttctttagaaacatttcctgtacaaggtcctaaacatttatttatgtgtagatttaaacaaggtcttgtcttattctttattgctttatctatatctattttacagcttcttattggatacgtactacttataagctccaaggtatcattcacagcagttatattggtatagggtccaaaatactttgccttatctttaagaactcttctaacttttaagattcttggataatcttcattcgtagttacttttatatatggataagttttatcatctctaagcactacattatactttggtctgtatctttttattaaattacattcaagtattaatgcctctaactctgaatccgttataatatactcaaacttatatatattcttaaccatagattttactttagatgtatggttttttgaagattgaaaatactgccttaccctattttttagagatatggcttttcccacatatattatatggtcgtatttgtctttcattaaatatactccgggctcagaaggtaatttttttaaatgctcttgtatatcaaacatctcgccctccaaaacattaaattttatactaaaattataccctaaaatatgaattttaaaaagttatacaatttccagtgctttagacaagttaaagtccatattcccttctataattgatttgaaaacaattttaaccatgaagagtaatatggactttactttgtattactatttacaacttatatttgactaatttacttataacaaaacagtttatcgtatatctgctctaaaatttttcacaatttatataacttaagaaaaatatttctttaagaattgacctgtataagaaccatcaactttagatacttcttttggtgttccagttgcaactatagttccacccttatctccgccttctggtcctaagtctattacataatcacaagtctttataacatctaaattatgttctatgactataattgtatttcctgtatctgctagtctttgtaatacttggattagcttgtctacatctgccatatgaagtccagtagtaggttcatctaatatatacaaagtctttcctgttggtcttttactaagttcagcagctaattttatacgttgcgcttctcctcctgataattgagttgaaggctgtcctaatttaatatatgaaagtcctacatccattaaagtttctaattttctttttatatttggtatattttcgaaaaactcaacagcttcttccacattcatatctaatatatcagatatagttttatctttgtattttacttgcaatgtttctctattgtatctttcacctttacaaatttcacaaggaacatatacatctggtaagaaatgcatttctatttttattattccatcacccttacaagcttcacatctaccaccttttacattaaaactaaatctaccttttttataacctcttgctttagcttcattagtagatgcaaaaatatctcttataaaatcaaatacacctgtataagtagcaggatttgaacgaggtgttcttccaataggactttggtctatatttataactttatctatactttcaattccttttatctccttatgcttaccagctctttgcttaagtctattcactttacttgcaacacctttgtaaagtatatcgtttattaatgtactttttccagaacctgaaacacctgttatgcatgtaaacttacctaatgggaactttacatcaatatttttcagattattttctgatgctttaactatttctataaaacttccatttccttctctagtagtctcaggaagcaatatttgttttttaccacttaaatattgacccgttattgagttctcattttcaattatttcatctaaagtaccctgtgcaactatttcaccaccatgtatacctgcacctggaccaatgtctataacataatcagcttctctcattgtgtcttcatcatgctctacaacgattaaggtatttcctaaatctgttagatgtctaagagtagttataagcctatcattatctctttggtgaagccctatacttggctcatcaagtacatataaaactccaaccaatgcagaacctatttgagtagctaatcttatacgttgcgcttctcctcctgataaagttccagcttttcttgataaatttaaataatcaagacctacatctcttaagaacatagctcttccttttatctcttttataatctcatgagctataaatctctgtttttctgtaagatttatattttccataaagtcaatcaattcatttacagataagtttgtaacttccattatattttttccatcaactaaaacagataaaacttcctttttaagtctcatccctttacactttggacatggtctctctgccatgtattcttcaatcttatctctcatgtaatctgaattagtttctctatatcttctctctaagtttactattacaccttcaaagtatgatttataatttctagttcctccaaattttgactcataagtaaactctacaattatattatctttaccataaagtaattcctccacaaaatcatctggtaaatctttaaacggtgttgtcaaagatacattaaaatgctctgctaaactttttatcattttactgtaataagtgtcatcattaacacctgttgaaccccatgctgccactgcaccttgttttattgataaatctttgtttggtactactaattctgggtcaacttctttactttccccaagaccattacaaacatcacaagcaccaaagggagcattaaatgaaaacatccttggagataattcttctatgccaattccatgttctgggcatgcaaatttagttgaaaaaagaatttcttctccatctattatttgggctattacaagaccatcagatagcttaactgcagtttcaattgaatctgctagtcttgattctattccatctttaattactattctgtccactacaacttctatattatgtttttgatttttatttaagattatatcatcactaacttcatagttctcaccattaactctaactcttacaaatccttcttttttgatattatcaaagacttttttatgtgtacctttttgtcctctaacaattggtgaaagaatttgtaatttcgttctatctggaaaatctagcattttatcaactatttcttgaatagtcatctgacttattttttcaccacatgtagggcaatacacatctcctactcttgcaaataatagtctcaaataatcatatatttctgttactgttccaaccgtagaacgtgggttttttgaggtagtcttctggtcaattgagatagctggtgataaaccctctatatattctacatttggcttttccatctgacctaaaaattgtcttgcataagcagatagactttctacatatcttctctgcccttctgcatatattgtatcaaatgccaaagaagacttcccagaccctgacaaacctgtaaaaacaataaatttatctcttggtaattctaaatctatattttttaaattatgttcttttgctcctcttattataattttatcttccataatgttgtttttacctttctatttttccaatttttcttctaattgtttcactttatctctaagttctgctgctctttcaaattgtaagttttgagcagcttccatcatctctgattttaatttatctatattagctcttatttcgtctttatcatctgtatcagatattccatatacaacttcttcctctgcaaccttagtagcttctatactatctcttatatttttctgtatagttttaggaattatattgtgctcttcattatataaattttgtatatctcttcttctctttgtttcatcaatagcattttgcattgagtcagttatcctgtctgcatacataattactcttccattttcatttctagctgcacgtccaatagtctgtattaaagctgtttcggaacgtaagaaaccttctttgtctgcatctaaaattgctataagtgaaacttctggtatatccaatccttctctaagtaagtttattcctacaaggacatcaaacttccctaatcttaaatctcttattatttctgttctttctaatgtaactatatctgagtgtaaatatttaacttttatccctatttctttaagatagttagtcaagtcctcactcatttttttagttaaagtggttataagcactctttcatttttttctatagttttagttatttctcctaccaaatcatctatttgattatttataggtcttacttctacaattgggtctaaaaggccagttggtcttattatctgttctgctattgtctctgagtgttgaatttcataaggtcctggtgtagcacttacaaacaacatttgatttatatttccttcaaattcttgaaaatttaatggtctattgtcaagtgcagaaggtaatctaaaaccattctctataagtgatgtttttctagacctgtctcctgcatacatacctcttacttgtggtatagtgacatgtgcctcatctacaattatcaaataatcatctgggaagaaatccattaaagtatatggtctttctccttctgaccttcctgtaatatgtctagaatagttctctatcccctgacaaaatcctatttcctttaacatttctatatcatacttagttctttgttcaattctttgtgcttctaatagcctatcattttccttgaaaaatttaatttgttcttgaagctcgttttctatttctacaattgccttttcaattctttctggcgttgttacatagtgagatgctgggaatataacaacatgatttctagtaccaacaatcttccctgttacataatcaatttctgttattctatctacctcatcaccaaaaaattctattcttattgctttttcatcattactagctgggaatatttctagtatatctcctctaactctaaaggtacctcgtgtaaagtttatgtcatttctttcgtattgtatctctattaacctttttattacatcatctctgtctctttgcatacctggtcttatagataacataagttctttatagtcttttgggtcaccaagtccatatatacaagatacagatgatattattatagtatctcttctctctaaaatagatgctgtagcagaatgtcgaagtttatctatttcatcatttatgcttgcatctttttctatataagtgtcactgtgagctacatatgcttctggttgataataatcatagtaacttacaaagtattcaactgcattgtctgggaaaaattctttaaactcactgtaaagttgtgctgctagagttttattatgagccattattagggtaggtttcttaacttgttgaatgatatttgccattgtgaatgtttttcctgaacccgttacacctaataatgtcgaaaatttctcatttctatttatagaatccactattgatttaatagcttctggttggtcacctgtaggtttgaagtctgattttattttaaaatccatagtatcactccttttttcgaacattagttcctgacatgtattattatatcatacctttataaaattgtttaagttattttaaatattttacccatttaaattttacttaaatctaaaacataaaaaaagacttctatctttgcaatagaagtctataattcatggaaaataaatactttattcaacttacataataaaatcaaatgcttctttttcaactccatctaattttaaatcaaacatttttaatatagttgctgcatgtgctctcaggtctccttcttctataaccacaccacctttaatatttggtccaaaagctataaatggaggtctattacctttagtaggtaaatgaccatgtgtcgcaacagcaaacttgtaatcttttatatctgaatcttttataatacttccttcgaaatcatttccaaatgaaattccttcaagaccttcaatcaccatttcaaaatcaccttcaagaccaaggttagatgcttcctctttggtaaaaatattctctatgaataattcttctttaaattcttcaagcagttctcttaattctgttaacctatctaagttatttactattatttgagctgatattccagaagaatttacataggcatcaaaatccttaacttctccattttcaacttttataaatccatttgatttaagcaagacatttggatttataactttatcaactctaagatgaccatggtccccaagtattataaaatttgtatctttgtatgtacctgcatcctttgtagcctgaataatatctcctagccatttatcattcatttttaatgctttatctacttcgtcattaaataagccataattatgtcgtgtatggtccaatgtagctaaatgtattagcattaaatctggtttatattcctttattatatctactgaacagtttactccaaataaatccatgttgggttctaatttccaatcaatataatgacaatgtctattgtaaataccgtccattataaccttactggagcttcgttcaaaagtttctcttgggtcatcttctctactaggagcccatatttctgcaatattataatctatatttggatttgctcccattacaggccataatacactagaggtagttagattattttcttttgctacatctataatagtttttacttttatgtcctttgaataccagtaccagtctttattttctttatttgggtcaaatttttcattatgatatataccatgttttttaggatatactcctgtaaccatactagtatgacacggatatgtcagagtgggataaacacaatttatattttttactatggagcaattttctagtatagatttaaagtttggtagattttttacaaattccaagtctttttcaaataaagaatctactgataatactataacctttgtcatttacattacctcttcatttatatattattgaatacttttaatcaacttacaagtctatataattatttatttgttttatctattactgcttgcattgcagaagttcctttgcttactacatcttttggatttgcatttaaatcagtaagcccctttttaatctcatccattagcttatcagttgcttccttgtatccatttaacattggaagtgcaacagcatattgtaattggtcagttgcaaccttatattgaggtttttctttatataatgtttgtaacttttctgagtttgttgcatcttcagttgttggtaagtatcctgttgatgaactaaactgaacgattttatctgtttgtgtcatccattctataaattctgcacttgcttctttttctttatctgttccaccttcaagcataactagattagctccacctgtaggagttgcgtatttttgattttttggtaggaatgctgttgatatttcaaacttaccttctgtttgttgcataagtcctgctaaatctgctgttgatgtaaatatcatacctactttaccatttacaaaatcttgttttgctacgtcccaggcattataatcttctccaggaggcattttcattattccagctttcatcatatcttgccagaatttaactggtgcttgtcctgcctcattattaaatgctacttttttaccattagttatttctcctccactttgcattaccatagcttcatagaaccaaatatctattggtgtttcaaaaccataagtatcttctgatttatttgtcattttactagcgtaatccttaagctcttcccatgattttggacctgaagggtcaagacctgctttagttgccatatctctatttatgtataatattggtgtacttctattaaatggcataccaacaaacttatcctcataatatgaatttgttaaaagaccagaaaagaatctttcttgatatgttttatcaaaatatttactcatatctactaaagcacctgctgatgcgaatgtacctgtttgagttatttctaataatgttacatctggttggtctttagatgttaaggctgcctgtagttttgttgcattttcatagtaatctttctgttttaacatatttacttgtacatccttatgttcactattaaattggtcaaccattttttgagcagtttctccattagttccacctaaaggagcccagaaatctatcttcgtaatattgctatcagtcttttctcctttagatgcatttgcatcattagaatttgaacacccaactaaagaacctaataataatgttattgctaatcctgttgctaattttcttttaagcttcattttcatcctccaaatttagtctttaattttttattttattcctgaatacataaaagcttcttttacttttttattcgcaaatatataaacaagaattattggtaaaattagaattatatttcctgccattattacattccatgcagtaattccttctgaagatttaaggagcgcaactcctattggtaaagttcttattgcatctgtatttgtcattactaagggccagaaataattattccaatggtatataaaattaaataatataaatgttattactgctggttttgccataggaaccattattctaaacattatttttaagtcagaagcattatctagtttagctgcttcaatagtttcatctgaaatctgcataaaattctgtctaagcagaaatatcccaaatgaagatgtcataaatggaattataagtggaatataagtatttataaatccaaacttactcatcatcatatagactggtagaaaagttacttgtggtggaatcataagtcctacaagcaaaagcccaaataacattttttcacctttaaatttaatcttagaaaatgcatatgctgctggaaccataactaaaaattgtaaaattaaaacacttcctgttacaaatacactgtttagtaaatatctaaaaaatggacctgaatgccatgctgtactataattttctaacactatatcatttggtataatagtaggtggtaattgcatcatttcttgtggatttttaaaggatgtcgatagcatccatataaaagggaatataaatattgcagataaaagtaatagaattaatatttccattgattttgatgctattttttttatatcaactttgtcttttttgataggttgtataatatccattgtctcctccttttggataaatcttataatatctactttttctttattgataatgaactttctttgataagagtctaaagttagcatatgtagcaatcataactatagctaacaaaaacatactcgctgcactcgcttgccctatgtcatagtatataaatccagactcatatatataataagataacatgttagttgaacccactggcccaccttgtgtcattatacttatctcatcaaatacttgaaaagatgcagttgttgttgttatcataagaaaaaatattgttggtgataatagcggcaatgtcactttaaagaaattcgttattttgtttgcattatctaatttagatgcttcatatatatagtttggtatggatttaagacctgataatactattaagatattgtatccaagagtcttccatattcctattagaattagtgacattaaagctgaactttcacttgaaagccactttgatgttggtaaatgtaatgtcgatagtatccagtttaaaaagccatattgtggctccataatccaaagccacaatacagctacagatactagtgaaattacatgtggtgtaaagattatactttgcgttaaattgtgtattatagaatttttatttagccaaacagcaagtactatggctagtgatatagatatagtcaccataaaaaaagtataaattgcagtgttcgttatagtttgtataaactctggattctttaaaagttctgtataattgtttaagcctacattttcaaaggttgaactaagaagactaccagatttgaagcttagagatatcgtcttaattattggatagactataaacaataaagttcctataatagcaggtgttatatataaatatgctttattaaattgctttttcataaatatctcctttaattttagaatacatacttttacatacttttacatcttctattctttctccatttttatcaaaataatataaatctttttctaatacacttattcttaaagttcttccaatatcaaatatatcattttccgttttgactcttatttctctattaagaacagataaacaatatatagtttcatttcccaacacttctttagtcacaacttttccaaataggctaaatacatcatcattttttccatctatgtttatactctctagtgttgctttttctggtctgaatccaaatttaatatcattttttatatctagtatgttcatacaaggactccctataaattgagctacaaataaattcttaggattttgatatatcttctttggagaacctatttgcattatctttcctttgttcattataactatcttatctgccattgacattgcctcaacctggtcatgagttacataaacaaatgtagattttagtttttgatgtaattgtattaattctgttctcatttgatttcttaatttagcatctaaatttgacaatggttcatccattaaaaatacctttggatttttaaccatagctctagcaagtgccactctttgtctttgacctccagataagttgcctggtttcacatttaaatattctctcaatcctactacatcaataacttctgttataagtttttctcttttttctttttctacttttttgtttttaagaccaaattctatgttttctctaacagtcatatgtggatataatgcataattttgaaataccatagctatatcccttttactagcatccgtttttgtaacgtcattttcttcaatttttaacttgcctgaagttatatcttcaagacctgcaatcattcttaatgtagtagatttaccacatccacttggacctaccaatactgtaaaagaaccatcttctatagtaagatttaaattttctataactgtattttttttattataagattttgttacattttctagtcttatatctgccatttttatcctcccaaaatatttaatttaattctacgatttacttatagattaataatactcttaatttgtaaaggatatattaagacaaagtgaatatatagtaaacttattaaaataaaggttaaattataaacattttttgttaaatatactgaagttaagatgatatacagcttatgttagctataattttctatatttttcatattcatggtttgctatcacaatgtgattttaatttatgaagagtcatataaaactatttattttttatataatttggtttgaaaataaaaaagacctctatgggggatagaggtctttaagtgggggagattgagtaatttatttttgctatattaagttttacaattatattatgtcccaaatttacaaggtttaaacataaaaaataaaacttttttaatttttataaatttacccaaaaaaaattacgtggctacgtcctactctcccaggcagtttcccaccaagtaccatcagcgctagagagcttaacttctgtgttcggaatgggaacaggtgtatcctctctgctattgtaaccacataatctttatgcttaatatttctattaagtttttaataagtttatagaacctagtaatactagtttctttagagttaacactctaaaaactacacatatatcttaatcaatgaacatcaaataaatattggtcaagtcctcgacctattagtatcgataagctaaatacattgctgcacttacaccttcgacctatcaaccagatagtctttctggggtcttacccttgcggtgggaaatcttatcttgaagttggcttcgcgcttagatgctttcagcgcttatccattccgtacatagctacccagccatgcccttggcaggacaactggtacaccagaggtacgtccatcccggtcctctcgtactaaggacaggtcttctcaaatttcctacgcctgcgacggatagggaccgaactgtctcacgacgttctgaacccagctcgcgtaccactttaatgggcgaacagcccaacccttgggacctactacagccccaggatgtgatgagccgacatcgaggtgccaaacctccccgtcgatgtggactcttgggggagataagcctgttatccccagggtagcttttatccgttgagcgatggcccttccacgcagaaccaccggatcactaagtccgattttcatccttgctcgacctgtatgtcttgcaatcaagctctcttttgcctttacactctacgtacgatttccgaccgtactgagagaacctttgagcgcctccgttaccttttgggaggcgaccgccccagtcaaactgcccacctgacagtgtcccaagaccagattcatggcctatggttagagtcccagtactacaagggtggtatcccaaggatggctccgccaaaactggcgtcctggtttcaaagcctcccacctatcctgtacatgtagtaccaagacccaatgtcaagctacagtaaagctccatggggtctttccgtcctgtcgcaggtatccggcatcttcaccggaattacaatttcaccgagtctgttgttgagacagtgcccaaatcgttacgcctttcgtgcgggtcggaacttacccgacaaggaatttcgctaccttaggaccgttatagttacggccgccgtttactggggcttaagttcactgcttcgattgctctaacagatccccttaaccttccagcaccgggcaggcgtcagctcctatacatcgtcttgcgacttagcagaaacctatgtttttggtaaacagtcgcttgggcctattctctgcggccacctgatggtggcaccccttatccctaagttacggggtcattttgccgagttccttaacaacagttctctcgctggccttaggatactctcctcacccacctgtgtcggtttgcggtacgggtacctttaacctcgatagagacttttcttgacagtgtgaaatcagctacttcgctactaaatttcgctccccatcacatcccagcattatcaaagcggatttgcctactttgactgcctcaatgcttgggcacacataaccaacagtgtgcttagcttatcctactgtgtcatcccttctctcaaacggttatcggtagtacaggaatatcaacctgttgtccatcacctacgcctttcggcctcagcttaggtcccgactaacccagggcggacgaaccttcccctggaaaccttgggtttacggcctgtgggattctcacccacatctcgctactcatgccaacattctcactcccatactgtccacatgtccttacggtcatgcttcaacccgtatgggaagctcccctacccatcattactgatgccgtagcttcggtagtaagttttagccccggaaatcttcggcgcaggatcactcgaccagtgagctattacgcactctttgaatgagtggctgcttctaagccaacatcctggttgtctgtgcaatcccacatcctttaccacttaacttacatttagggaccttagctgacgatctgggctgttgccctttcgactatgaatcttatcacccacagtctgactcccaagtataagatgacggcattcggagtttgatagtcttcggtaggtgcaataccccctaggacattcagtgctctacctccgtatctctcaccttgaggctagccctaaagctatttcggggagaaccagctatctccgggctcgattggaatttcaccgctacccacaagtcatccccgagcttttcaacgctcgtgggttcggacctccacgaaattttactttcgcttcatcctgctcatgggtaggtcgcccggtttcgggtctacgtcaagtaactgaacgctcagttaaaactcgctttcgctacggctccgcaccttaagtgcttaaccttgctacttaacgtaactcgttggcccgttctacaaaaagtacgcggtcacacaagaaatgtgcttccacagcttgtaagtgcagggtttcaggttctatttcactcccctcccggggttcttttcacctttccctcacggtactatacgctatcggtcactaggtagtatttagccttggagggtggtccctcctgcttcccacagggtttcacgtgtcccgtggtactctggatcatatctgaagtcttctcgtttaacatacaggactattaccttctgtggtgggtctttccaaacctcttcaattacgatacctcttcgttatgatatgtccgcaaccccaataaagaaaactttattggtttgggctaatccgcgttcgctcgccgctacttacggaatcgaatttctttctcttccttcaggtacttagatgtttcagttccctgagttcccctcattaagctatgtattcacttaatgatacttagacattactctaagtgagtttcctcattcggaaatcttcggatcaaagtttacgtgcaactccccgaagcttatcgcagcttatcacgtccttcatcggctcctagtgccaaggcatccgccctgcacccttaataacttgaccagttaaaaaggtttgatagattagaagctatcaacttcgataattttaaaaagttatcagctttatatattacaaattagatgtcatatcactaaatatatatatgcagttttcaaagtgctaaagcacggcgccaacggataaatcccgttgcttaaagtgctaacgcacaacgccaacaaacaaacttcacatgcgttcagtttattctgttgctaaaagtgctaattttgagtattcgtaaaaacgaaccctcaaaattaaacagtaggtaattctccttagaaaggaggtgatccagccgcaccttccgatacggctaccttgttacgacttcaccccagttattgattccaccttcgacgacttcttccaaaaggttagataatcggcttcgggcgtctccaactcccgtggtgtgacgggcggtgtgtacaagacccgggaacgcattcaccgcagcattctgatctgcgattactagtaactccagcttcatgtaggcgagtttcagcctacaatccgaactgagagtagctttaagggattagctccaccttacggcttggcaaccctctgtactacccattgtagcacgtgtgtagccctaagcataaggggcatgatgatttgacgtcatccccaccttcctccaggttatccctggcagtctctctagagtgcccaacttaatgatggcaactaaagacaagggttgcgctcgttgcgggacttaacccaacatctcacgacacgagctgacgacaaccatgcaccacctgtcaccaatgtccccgaagggaactctccgattaaggagatgtcattgggatgtcaagcttaggtaaggttcttcgcgttgcttcgaattaaaccacatgctccgctacttgtgcgggtccccgtcaattcctttgagtttcactcttgcgagcgtacttcccaggcggagtacttaatgcgttagctgcggcaccgaagggggtaacccccgacacctagtactcatcgtttacagcgtggactaccagggtatctaatcctgtttgctccccacgctttcgtgcctcagcgtcagttacagtccagagagccgccttcgcaactggtgttcctcctaatatctacgcatttcaccgctacactaggaattccactctcctctcctgcactcaagtctcccagtttcaagagcttactacggttgagccgtagcctttcactcctgacttgaaagaccgcctacgcaccctttacgcccagtaaatccggataacgctagccccctacgtattaccgcggctgctggcacgtagttagccggggcttcctcctcaagtaccgtcattatcttccttgaggacagagttttacgacccgaaggccttcatcactcacgcggcgttgctgcatcaggctttcgcccattgtgcaatattccccactgctgcctcccgtaggagtttggaccgtgtctcagttccaatgtggccgatcaccctctcaggtcggctactgatcgtcgccttggtaagccgttaccttaccaactagctaatcagacgcgggtccatcctgtactggctcacctttgatattcaagagatgcctctcaaatatattatcccgtattagcatacctttcggtatgttatccgtgtgtacagggtaggttacccacgcgttactcacccgtccgccgctctttaccgaagtaaatcgctcaacttgcatgtgttaggcacgccgccagcgttcatcctgagccaggatcaaactctcaaataaaagtttatcaggctcagatactattgttatcaaaatatctggctttatggtttgtttcttgttttataaattaacctactgtttaattttcaaagttcattttttatgtttgcccttttcttaaggacaagtaacactatatcatcttaaaaataatccgtcaacacctttttaacattttttattttattttttatatatcaaacttcttaagttcttctaggtcaagtgttaccaacatattaagcacatcttttcttttacttttatcttcgtatttttttataaccttttttcttatatctcctaatacatttaaatactcctcataatcttcagtatatctctcttcaatttctttttttatctttgatgataatgaaggactcttgcccccagtagacacacttataagtaaatctcctctttttatatatgatggaacagtaaagttcgatatttctatattatcaactacattcactagcttattttttgctctacaatataatcctatttccatatttaactctctattatttgtggcagcaattattacagaagcatcttttatatatatttctttataatcatcttttattatttttatatttccttttaaatcataaaatttatttaaaatttgtttagaaactatagtaacatttttgttaaactctaaaaaatttttacatttcctatatgcaacttctccaccaccaattataactacatctaactcatctaattttaaattaataggatatagcatcttctacctccaaattttatttagttacataaataaagtatagaaattgtaaattagtttctattattcttcaataaatgtctaaacaaaactactgtataatagttaattacaattcctatactttttgatattctttatactactagaatttattttttcaacagtttagcaatgtctttagcaaaataagttattattatatctgctcctgctctttttatagatgtaattgattcaagaattacatcttcatttaataaaccttccttcacagcaaacttaagcatagagtattctccacttacattataagctgctagaggtaagtcaaaattatctttaactcttcttataatatctaaatatgataatgcaggtttaaccataagtatatctgcaccttccaatatatcaagttcagtctctattatagcttcattgctatttgctgggtccatttgatatgtttttctatctccaaaagatggtgctgaatgagctgcctctctaaaaggtccataataatttgaagcatacttaacactataagccatgattccaacattttctaatccattttcatctaaagcttctcttattgcttgtattcttccatccatcatatcagatggagcaaccatatcagctcctgctttagcatggcttacagatattttagccaaatactccaatgatttatcattatcaacataaccagtatcagttaaaatcccacaatgtccatgacttgtatattggcacatacagacatctgttattacatttatatctgaatttatttcttttacctttctaattgccttttgaactattccattatcattaaaagcttgtgaagcacactcatctttttcatctggaacaccaaataacattatatgttcaattcccaactcacttatttcttttatttcgtcttctagcatgtctattgataaatgatatacatctggtaaagaattgatttcttcttttatattttccccctctactacaaacagtggatatattaaatcttctacattcaccttagtttctcttaccaaatttctgattgctttacttgctcttagtcttcttggtcttcttaacatattcaagcctccaaaattaattttttataattaaatctactaacgaatctatagtagatgtagcagattctttgtacaattttattcccaaactatttattgtctctgtagttataggacctatagatagtgtttttattttttctaatattttaatattttcttttcctataatttcaacaagattatttactgttgaggaactagtaaatgttatataatctatatcattagaatttaaaatatctaatatctcaccttttttatcctcatctattactgttctatatatatgtacttctgttacttcacaaatagccttaagtttgtcaaccagataatctctagcattttctgctctaggtataagtatattatcgttatcatttaaaataggagctaactcttcatacagtgactctgctacaaatttttttggtactatatccgctataattcctctttttttcaactcatttgatgtagcagaacctatagcacatacctttaaattagataatatccttaaatcaaaattcatttcatatatcttttcaaagaagatttctacggcatttttactagttagtattaaataattatacttatttatattttttatttcattttctaagttaatattattttgtattttttctaccttaatagtaggtatttctataggatttccacctaaatccattattttttctaccaatacactattttgatttctagacctagttacagcaatactttttccaaataaaggcttactttcaaagaagttcaacttttctctaagtcctacaacactcccaactactataagagttggcggttttacttcttctttaatagcagtttcataaacattctcaagtgtagatgtaacaactctttgattatatctagttgcccaacttataagagcaacaggtgtatccttatcttttccttctttcattaagttttcacttattttctctaggtttgaaattcccatcaaaaacacaagagtacctttgttatttgcaagagcattccagtttaattctccactatcatcacccttcaaatgacctgttattacatgaaatgacgaagcatggtctctatgtgttataggaatacccgcataacataaacctcctatagcagaagttatacctggaactacttcaaattctatatcttcatctactaaagtctctgcttcttctccccctctgccaaatacataagggtctcctcctttaagacgagttacaatttttccttctttagctttttctgctataattctatttatatcttcttgtggcaaaatatgattacttgatgccttgcctacatatataagttcacaatcaggcttagcttctcttaaataactactatttgctaatctatcatatactattacatccgattttcttatacactctaaaccttttaaagtcatgagtttataatcacctggtcctgcccctactaagtaaaccttacccttcataattctcatactccttcaatacaagtttagctaactttaaacctaactctctaggagaagaaatatctccatctatagacttgattactactttttttccttctgaatctccatataagccagtaagatgtattttatcttggattatttcacaataagctgccattggaatatgacaacttccatttacaccatctaaaaaacctctttcagccaatatttggatttctgtattctcatccttcagtgaatttactattccctctatcgtactatcattgcttctaatttctatagctaaagctccttgggcaggtgctggaataacaacatcaacaggtaaataagaacttattttatcttgcaaattagctctaattattcctgatgctgccaacacaataccatgcatgttttcatcttttatttttcgtatcctagtttccacattacctctaacttgtactatatttaaatcaggtctttgtttcaataattgaaacttccttcttttacttcctgttcctattactgctccatgaggcaaatcatctaaatttttatatccttctctaagtattagaacatctcttgggtcttctctcttaggcgtatgagcaaattttagtccatctgctaaataagaaggcatatctttcatactatgtactgctatgtctatttttccatctaataattgttgctctatttctttgacaaacaatcctttatcacctattttatccagtgaaacattttgaattaaatctccttttgtctttatgattttaatctcaaaactaatttctggatacttcttttttaattcatttattacccactctgtttgtataagcgctagagtactacccctagttccaaccactatattcatattaagtctcctttaaatattgctttcacctattttattttattatctttatttactagtatagtagaaaaataagatatcttatcttcaaggtgcgcttcttttaaatctgtaaacacattttcgctttcttgggaagaattacttactaaaatagcatgttctattaaatcatacttttctaatttttttattatttctttaaaatttttatataccttcatcaatactattgaattataattttgcaaagcatactctatcttatcatcttccatagtacaaggaattaccactaaagcttctttatccatgactaatggaaaattctgattagatgctatattggaaaatgatgaaattcctggtatagtttcgacttctacctctcctaatattcttttcattatatatacatatgtactataaatcatagggtctcctaatgtaacaaatcctacatttttaccatcattaacatctgatataatttcttgtgctacattgtcccaagctaaacttttttcattcccatcaaaactcattgggaaatgcctagactttatttccactgattcaggtaaatattcactaactattgataaagctagactatctccacccttttttgattctggagtgtatagaatatccagtttctttaaagtattaaccgcttttatcgtaagtaaagaaccatctcctggccctgctcctataccatagaacttagcattctctgcacattttacagcatgacgaacaaatttatcttgtatataagaattttctcctagtccttttaaatgaactcttacgtcaaatccatcttcttctaatattgttttccaagaatcttcttcatctcctgccatatcatttatagcatggtctcctgcaactaacataaatggcatcaaatttacagtttttatatttccttcttttaatcttcttattacatgttctatttctggatacccttcaactgtaccaacataagcatttattccattatccctaagcatgtattccaatgctggatacgctgaatgtgattcatgaagtgttccatgtcccataaatactactgcttcattactttccatatgaggaatttgatgcttaattgcctctacagcttcctgataatcttcaatatgtgtaagcaaaggtcttcctaatacaatctttttgaatttagaagaatatccatctacttgttcttttaatttgttaaattcttcgccacatataatatgaagtgtttggattattacttcatcatatccttgttcatatattttatctaaagcctgtattggattatctatttctattccatcccttttttttattttatttattatcatatttgatgtataagctctaaaaaaatcatggctttttaacgaattttttattttatcttcacatatatctattgtcttttctctcgtttcatgatagcttgtaccaaaactcactactaataaggctttcttcatatattctcctcctaaaaattacacaagtatgtctttaattttatttatgtcattaaatacattttcgtagttaatcgattctctttttataattattactggtatattgaaagttttacatgcatttaccttctctaagaacccaccagctattccactttcttttgttatgactaaatctatattgtaatgtttatatgtttcttcatttatatactggctaaatggacctttcatagctactatattatctgcacttaaacctaatttttcacaacttaatatgacttcactcgttggaagaactctaacaactaaatttttatcacttatttcctctataaatctgttcaaatttttacttcctgttcctatgaatatatttgtccctattttatttgctatttcacaggcttcttcaattgtatctactataaatttattatcataatctatttcttcaattaaagattttctctcaaaccttatataatctatattcaataattttgcacaagtaatagcagttttggatacttcaactgcataaggatgagtggcatctattatttttactatattattatcttttataaattttagcatatcttcttttccaagcttacctaaaattacattctctgcatgttgttgtgcaagttcccttccataatctgtagtaactgaaaggatatatggttgatttttcagttcatttatcttatcacatatagataaactatctgaagttcctcctaaaattaaaatcatactgtataacctcttggagttatcatcaattcaccattaatataggtagacttatttcctattataaccattgtagtcatatcgactttttcaaagtccatattttcaaaagtacatacaaacttttcttctttttctctacctacatcttttaccactccaacaggtgtatctccacctttaaactcacccattattttaaatgctttgcttagatgttcacttcttcccttacttcttggattatacaaacaaattacaaaatcggcttcagcagccaatctcaatcttttttcaattacttcccacggagtcattaaatcactcaaacttatatgacagaaatcatgcataataggagctccaagtatagctgctgcaccaatacttgcagtaacacctggaattacctttacttttatatcttcatcttctttagatattaattctaaaatgagacctgccatcccatatattccagcatcaccactgcttacaactgctactttttttccttttttcgcttcctctactgcttgtttacatctatcaacttcttgcctcataccattttggattatttctttaccttgtataaattcttctattagttttatataagtcttatatccaacaatagcctcagaatcttctattgcttttattgcttctaaagtcattgtatctttacttcctggtccaattcctacaacgtatatcatatttttattctccccactgaaaaagttattcctttatatttatgtttttcaactaacaaattacctttgctcaaaagatatgctataggttctgctactgaatacacgcccacattttttttaacaaaatcagatttatcaaaaagattatcaaccttagatatttcatctattgaaaatgttttaaatggcacttttagtatttttgataattcaattattgctttttcgtcttttttcagttctatacttccaactgtgtttattgctctaatatctatattttgtttattaagaaactcttcaagtgaattatacatcagctcactatctgtgtttcttctacagccaattcctatcactatatctcttggaattacctttattatttttttagtactatagcaatgttcaaatttattatctaagtttaaattctcaatatcttcaatacaatttattttattgcttactacaactaatttttctatatatgtgtttgaaaagctatctcttaactcatccttactttctataagtttaaatcccctagtatcaacttgatatccttcatcaacatataatccaacacatttattattcactagcatagaatttacttcttttacactttctctaaaattatcaatatgtgcatttagtttttttgctatcatatctaaggaagctttttgatttatatcagtagctgttgttattactggattagcatcaataagactacttatgtactgtgtcaagctgtttgcccctccaatatgaccactcaataaacttattacgtttttgcctttttcatccattaccaaaattgcagggtcactaaacttacttattatgtatggtgctatacttcgtacaactatacctgtagccattataaatattatgtaatcaaatttgctaaatatttctcctacaaaatcacttaacttcttttgaactgtatgtacacatgtttcttcaacaactaaattactttttttattttttacttgatatataacacagttatttactagagaatttatctttacagctaaattttttccattttctgtaatacagattatagcaatattaccctctatattcatgtttgaaatccttatcatataactttgaattattatactcttctcctaaaaatctcccaaccattattaaagcagtcttatttatgttgttttctttaacttttacagctatatcacttaaagttcctttaactattttttcatctgcccaagttgctttgtatataactgctataggagtatcttttggatatccaccttccagtaatttagacacaactttctcaatttcttgaacagataaaaatattaccatagatgtctgatgcttagcatatgattgtattgattctttctctggaaccggagttctgccttccattcttgttataattacactttgagaaatttctggaactgtatattcaacccctaaagatgatgctgcccctaaaaaagaacttactccaggagtacagtcataatctatattcaatttatttaaatcttccacttgttctctaattgaaccatatatagaaaaatcacctgtttgcagtcttacaacagatttattattttctataccttctctcataacatctattatctcttgtaaatccatatgtgcactattatgtatttggcaatcttctttacagtattccaaaagttcaggattaacaagtgaacctgcatatatcactacatctgcattacttaataatttgtatccttttaatgttatcagctctttatctccaggtcctgctcctacaaaatgtactttattcatcatcattttcccctttttcacaagatattatatatataggatttagtggtttaaaatattcaccttttcctagtttctctagtttagaaacattcaaaacacatacatctatttctttaaatccatgctttttaagcagttttaaagtttgattaaatgtatctattattataaaattagctacaagtcttcctcctgtaacgagattttttttagaccattctattatttcttccagattatttcctgttcccccaagaaaaatagactcaactttaacatttaaccctagattaattggagcatatccttttatcacttctatattttttaagttgaatttttttatatttttctctataagctctatagcgtcatcatttttctctatagatataacctttaaattaggataattatatgcagcttcaacacttacacttcctgtaccagcccctatgtctatgaggtttttagcatttactaaatttaacttacttattgatattgctctaacctcttccttagtaattggaactttacctgttataaattcactattcctcatctaaaatcaccacaacattcatatcaaaattgtccattcttattatctcttctggtttcgctattgttattttttcattgtcatatgacagattttctcctacaacaataattttatttagatttctatctattatttctctacttatttgttttggtcctatctttgaatctgtaaccatacatacttttttatgtgataatatgtaatcaaaatctggtattttgccatgactacttgtaatatatacatcattcatatctacatatatttttgaaaatatgtactgtaatgaactaatcccagaaaccacgtttaacatcttattatcaatatttttagatagatatctacctatcccatatattaatgggtccccagatgctattattgatatttgcttttctttattgttatttatgtactctataatttctcttaaattagaatccagaactattttttctccttcaaaattttttatagactctagatttcttttaccaccaattaatacatcagaagtggaaattaaattttcacctttttttgttatatagtctaagttaccaggtcctagacctattatgtttatcatataaagacctccactaaatcatctgtattatccgatttacctaataaagacttatccattgaaaatatgattacttccacatcaatatcatctgaatcttcattcaagtattgctttactctctccttacatttattacttaatatattatatacttctctatattcactattatttattagctctacagcttcttcagtagttacgcattgatttattttatttaaaaattcgtatctagctcccattaaagctaagtttgccactaatatctcacttctagcatctgctaccttactatgagtattaaaaataccagcagatacttttataaatttacctatatgacctgccattaagatttttttatatcctattctttgagcttctttaatcatatagcctataaaattacttaccctaactacatacttaatatctaagtttaatttttctcttataaactgttctccatgatttcctggaaccaatattattttatctaagccttgttcttttttcatctgaagttctatagaaagagacttcttccaaccctcatcactcataggttcaacaatcccagttgtacctattatagatattcctccaactatacctaatcttggattaaatgttttttttgctacagtttctccttgtggagcaaagattgttatttttaaaactttatcatttccaagtatagattcaaaattatctcctataagctttcttatttcatggtttatcattttaagtggagtcggatttatagcaggtttaccaacatccacactaagcccttttttcgtaaccacaccaataccagttccgccataaaccctaataaacttatagagctcacttttacactcactattggtgcttaaactatctatatcctttagagtaagataccctttgttcttatcatttttagctacaatttcagctcttgcataaatatccatggtatgagttgcatctatatcatctccaccatctttttttatggaacattccacaaatgtatcagaaatatttatattatcaacttttagtagtaatggtatccccttaggagtatctatatttatagtattgattctattttttgtaatcaacatatatacagcagccttagatgcacctgttgcacatgaacctgtagtatatcctcttctatatttttttccatctatatatacatattcttccatataggtacctacatagtatataatatagcatttactattgctgctgctaaattactgccaccttttctacctttagaaattatatatggtatatctgttttttcaacttcatcttttgattcttgtgctcctacaaaacctacaggaactcctataactgcatctaaatctaatctaccttctgatttcatctccataactttatataaagctgttggagcattacctaaaacgaatatttttcttccttcttctttagctgcaatttctactgctgccatagaacgagtaattcctttttctttagctaattttacagtttcatcatctgccactaaacatttatacttacatcctaatgattctaactttcttttatttataccactaagagccatatttgtatcagtataaatacttgcattattttttaatgcatctattatactatcaactgcttcttctgatatttttaatatatctaagtaatcaaaatcagcagtagtatgtatagctctttttattattttttcttcaatattattcttaaatttataatctggtctaatttcgtctattatttcttgtatcaattcaaaacttttttcttctattttcataggattctttatgtattccattctatttcccccttaattcctccattaattatgttttgtgtataaattttattatagacagaatttatgttagattcacataaggtatctatcatctttttatcattcatagacttatcaattaaaatacctactacagttccactgtgagcaatatttactccatatgctccatatttttttgatatttttattatttcatttaaatactcttttttttctatattctcatttgctaagctactcaaagtacaagcctctccaactagagataaattattttttttcaatccttcttctaaaagagcaaatgatttttttattacttctttattttctacttttaatttattataatcttgcctcaatctaattttcatagtatctagtactttgtttggttcaagtattataactttcgcattggtcagatttcctaggtattttataacagttccatttagaggattaaatatactatttttatctataaatatagaatctgttggttctatttctgctgctaatttagaaatctcctcactacttaaatctttatctatcaatgataatgttgcctttattgtagctcctatatcagcagttgaacttgccattccttttccaacaggtattttactatttatatttaaagaaatatttttagtatattttttaggtaaattaaatttttcaaataccttttcaattgctaaccttgacttatatctccctaaatttatatctactaatttttcttcaatatacacttcagaatacatatctattgcatatgaacataaatattcttcatcatcaattataccttgtacaaattctccacaagatgctgggcatattccataagatttcattttaatcacccaataaatttttcatattttctataagaattttgttatcttcatgagattttatagccactcttataaaactatcatctaatcctataaaattagacgcatctctaactaatatgtttccttgcttaagcaaatcttttttcaattctttagttgtttttttatatgctcttatcaaaataaaattagcatctgtatcatagacctttatatttcttatgtttctcaactcttgtaacatatattttctttcttctatgtaatattctttactatttttaatatactctttatcttcaaaaataaaattggatagtatatctgcaaaagaattaatagtccatggctctttgtgttcataaattttgttcataatttcagtgttgcttgtaagaccatatcctagccttaaaccaggcataccaaaaaacttagtcacagctttaattataaatatatttttatttgattctatatatttaaccaaactgtatttactttcatcttcaacaaattccatgaaagtttcatcaattattagtaccttattatgtttacctagtaaatgaacaagttcctttaaatcttggacattaccactaggattattaggattacatataaataaactatcaaatctttttatattttcttttattatatctatattaagtttaaagttattttctaaatctagctctaaatctataatatctaaattatttaactcagcacttcttctatactctgaaaaagtcggatttattatagccaatttttttttaacactcttcataagcaaataaatcacttctgttgcaccatttccaggtattataaagtctggatttatacctatatattttgatatattttctctcaagtttgtataatttatatctggataattcctacactcttctaatccttttaaaatgtatctctctaaatttggtaatacatttggatttatgtttgaactaaaatcaattatttcttttgggtttttcccatataatcttgccatttcacctacattggcaccatgccctaaatccttcatctatgtcccccttaagttagcaaacaataatttatataattaagttaattaaaatcatcctacataacacatgtattagtgtaaataccaacatagatacaaatgaagatacatacataattttattagttttaattatatcttctttatctatctccctaagcttatcccctattgttggcttatatactttttccccaaaataaacgttggtacctcctagttgtattcctagagcaccagatactgcgccttctgaaaaagcacaatttggacttttatgattctttctatctctaatagagattttaaaacagttcctatagttataatttaaaaagaaacttccaattgtcataagaataacagatattctagctggtatataattggctatatcatcaatcttagcagatgcaaaaccaatatctttatactttttatttttatatccaactgttgagtctaatgtatttatagctttataggccatagcaagtggtgctcctccaataaatgcataaaacataggcgcaattataccatctacagtattttctgcaacagtttctacagttgctcttattatttcaggttcacttaaattagtagtatccctacctactatataagatagctgaatcctagatttttctatatcttcggtttttaatacattataaatttttaatgcttcgtcttttaaacattttgtggctagtgttgtataaattataaaactattcactacaatactcaataatatattaaaactaaatagcttcactatagcataagttgttaaatatgttattccaacggttataaaccataatataaatcccccaaattttaactgcctatcatttttagagacctttcttattataccttgagtaaaatttataagtttaccaataaatctcactggatgaggaaaagaatatgggtctcctacaattaagtctgtcacatatcctatataaatagataaaatactcatttattcatttccttttttcaaaaaattttctatacaatttaagttattataaaaatgagtatgaagatatgtagccaaagtgtttcctttactataaccaccatcccactcttctactatatttccatctctttcttttctcattgaatatacacatttttcatcactttcaaatattgaatgatgaaactcatgccctttaatagattccccttttttagataaaagagtattttccttggctacaccaatacagtacccaaatctctttaaagaagatgtcatcttactaattccactaaatattccaaccatattaaattcttgttcttcttgattcaatagtttctcacctaggtacatcagtcctccacattctgcataaataggtatattattgttatgtgcttctaatatggaagttctcattgactcatttgcttctaattcttttccaaatatttctggaaaacctcctccaatataaatataatctgcatttggcactgatgcatcttcaagagggctaaaatagtttatttctaaaccaagttcctctaaaagctctatattttctctataataaaaattgaatgctttatcatatgctatagctattgatttattattaacatgttcttttattttattattttctatcaaagtttgaaaatcaaaatcactctcaaattcatcgctttctgatatttcaattattctgtcaatatctatatagtgttcaatttcatctgctaaggtataaaatttttcccttagtgatttcatttctacactaggaactaatcctagatgtcgagattctaaagagaatttgttatttggaggaaaataccccaatacttcaacattacaatatttttctatagaactcttaattatttgataatggctattagtctttacattatttactataacaccctttatatttacatctttatctaattccttatatccaagtaccatagcagcactagatgctgccatagatttaccatttataactaatataacaggtgactttaatacctttgaagtatgtgaacttgtacaattatctaaatctattccaaaaccatcatataagcccataacaccttctattactgaaatatctgcatcttttgaggacttatttactatatactttattttttcatcatctaacatataagaatctaaatttctagaatgtcttccagttataaaagtgtgatatgaagggtctatatagtctggccctactttatatggctgtactttcatatttctcttaaccaaagcttgcattattcctaatgatattgttgttttacctactccactattagtaccagcaattaaaatttttttcataatacacctcctacctaaattataaataaaggtcatcattatttcataatctcatatattttctctatatctaaatgttctcttaaaaaatcagccaacttatcatactctttatccttaaattcattaaaagagtttactttgctttctaattctcctaaaccttttttctttcttatattgtttaaaattgctcttgtaaagcttatttcatcaaatattccatgaagataagtcccaattacattcccctctttatttacacttccttcagtataattcacttctttatcaagttttttagttattaaatctaaacttcttacatcattacctcgctttgtaatgcccatatgaatttcataaccttttactttttttcccttaaggttattcatgtattcactgatacattcaacaatagtagcctctacttgtgttgtagtcttttctttctcaaacgttgtttctgtatctaaaagacctattccatcaacttcttcaatttcactttcaacatgataagggtcttttaattttttacctaacatttggtatccaccacatatcccaaatatcaatttaccttgactatgtaaatttttgatttgcgattcaagaccactttttcttatatatgttaaatcgtctatagtacttttagttccaggtattattaatatatctggatttcctaaagattctccatagtctacatatctaatacttacatcttcttgtgtctcaaatatattaaaatctgtaaaatttgacatatgtggggttctaattatttctatgtgtatatcacttttattcatttttttcttaaatctcgtagttacactgtcttcatcttctatttttatatctgtataaggtactactcctataacaggtacttttatgatgtcttctagcatctttacaccatcttgtaaaagctctttttttcctctgaatttattgattattacaccttttactcttcttttctcatcttcatttaataaaagcattgttcctgctaatgaggcaaatacgcctcctctatcaatatctccgactattattacaggtgcatcagctatttctgccatacccatattagagatatctctatcttttaagtttatctctgcattacttcctgccccttccataactacaatatcataccttgaatttaagctattaaatgtttccttcaacacacctactaactccaatttataatcatgatacttagaagaaggcatttctcctacaactttacctcttacaataacttgacttttattattcccagaaggttttaataaaactggattcatatcagctattggctctattttcgcagcctctgcttgaaatacttgtgctcttcccatttctaatccttctttagttataaaagaatttaaagccatattttgtgacttaaaaggagcaacagtataaccatcttgcttaaatattctacacaaacctgctactaagacacttttacctacatttgaagctgttccttgtagcattatttttttccccactttccatccctccttgttaaaatttactaaaaaacaaattaaaaaaagtcctaatacttctaaagataggacttttatatatattaattaaaaatctttcaccccgaagacctcttgttttaaattaaattaggcaggtatcctggcttaacttcatcctacttctataaccttcccatcaaactgacagtggtatttatagtttcgttggtttcacagtagcgggggctgcaaaggcatctaacctttttcccttttaacatctaattaagaacctaattttaatctaatattctattttcattgctaattttacagatatattacaaacacagattgtaatgtttggttttgattaaattatatgaagtctgtaaaattcattttatctattacagcaaatccaccatcaatttctaaaactgtaatagatgcattatcaattttaaagttccagtgatacttataactaccagaaatcaaatgtgttattatatttcttattgttcctgcatgagaacatataagtattgtctttgtatctaaattactatcattttctaaaattatattatcaatttcttttgccactcttttataagagtctatcaaactttctccatttggatatctatagttgttaccttcttttatcattttttcaaactcatttggatatttgattttaatttcttcaaaagttcttccttcaaagtctccaaaactaatttctcttaaagcttctttttcttctatttctaataatttcaattttgatattttttctactgtatctttagtacgtgtagatggtgttgtataaaccttatctatgttttcattactcagatatctggtaattttatttatttgtagtttgccctcttcactaatacaactatttatatggcctgataatcttccttttttattatcatttgtcagtgcatgtcttattaatattaatcttatcatattatcaccactttttactttaaaaaaacataaaaattaacaaatatatgtaaattaaatatacaagctctgaaagttctattccacagcctaatatatctcctgttactccgtcaatttttttataaatatgttttttgaataatattataaatacaaaaaccactataatcgaacctaatactttaatcaacactatattaggtaataaaaatataaatttagtaataagagcaactatcaataatgtgtatattatagcagttattaacatacttgtagttaattttcctataaataaatttcccattcctttttctcttggtgtcacggttttatatgtcaataacattactcctaaccttgcaatcattggcataaaaattataatccacaatgaattattacttattatatcgtaaacgaatccaacctttaataaaagtacaaacataattgctagaagtgaatttgtacctaatcttgaatctttcattatttcaagcattttttctttatccctataactatatattgcatcaaatgtatctcctaatccatctatatgaagtcctccagtaattaagacaccagctagagttattattatagaagctataaatggttcaaataaaagcatagaaatccatcctattaaataggataatatacctatgacaaaacctacaagtggaaaatatactattgacttataaaattcatcatcaaatcctacatttaattttataggtatccttgtcaaaaactgtagtattaaaataaatcttttcataattgcatactactcctttatcttcatagctatgccactaactacaaaataaacttcattacttttcgaagctatatattgatttatacgacctacaatatcagcataaattctactaagtttattcccaggaacaattcccatacctaactcattcgttacaaatacaaagtatagatttgttttttctatttcttcaataagtttgacaacttgttcttttatgtattgttctaatttgtttatttcttcttgactagactcttctatatttagattgtgttcaaacattagattatttactaataatgttacacaatctagtataacagtttcatgttctttatatatctccttaattatggaatatatatcttcatatatttcataagtattccagtttctaggtctattctcttgatgtttttttactctatctttcatttcatcatcaaatggaatagaggttgctatataagctgtattattatttctgtcaaaacatagtttttctgcaaagttactcttccctgacctagctcctcctgttactagaataattttactcatcaaaacactcctacatattaaatttttatatttatcttcccatgtcaatttcatcaaaagttgccatatttttgtaagtatagtttgaagcttctattatatcaaatgctaaagcagctccacttccctcacctaatctcatatccatatttaatagagggtctaattttaatatgtctaatgctcttttagttcctgattctgctgataaatgagatgctatcatatattctctagtttttggatttatcttatatgcaattaatgctgctgcataagaaataaacccatcaattactactggaatcctattagcactacaacctaatataacacctgccattgagcctatttcaaatcctcctactttagataaaatatctactccatcagttggatttggattattaatttcaatagcctttctaattacttcagccttatgctttagtctttctttcttaagacctgcacctataccagtaacttctaacgggtcacaccctgaaattacagatattattgctgtacttggagtagtatttgctatacccatctccccaataccaataaccttataatctttttctatacactgctctgctatttcaatacctatctctaaacatctaatggcttcttgtttactcatagctggaccttttgccatatttgatgtcccttttcttatcttgtagtctaataccccatccagtttttcatcacagtttattcctacatctacagctacaacatctgcccctacaaatttacttattactccaactccacatagacctttcgaaaaatttggaaactgtaattttgttatattttgagggtcaggtgctacgccttcttcatatacaccatggtctcccgcaaaagcaattataacctttttacttgtgtcaaaattttcattgccaaatattcctgccaattgcatgcaaatatcttctatctttcctaagcttccagttggatgtataagcctatccaatctctgctttgttttttcaatagaagagttatctagggaatatatgttttttgatatactttctaataaactcattttttatcctcccaacatttttttattttttaaactctctttttagataaaaaatactcttattttctaaaaatttcaactttttctttttatttttacatacatataaaaattattctacattttatgttcatttcctttattttacattgtcaatttgcatacaattagatgctttttgtaaaaatatatttaaaagaactttaaggagatgatattgtggatgatttttctaagttaaaaagtttgtatgaagatggatatagatgtatttatcatgattgtgttgataataattatactatctatcttaagaatttttatacggaaggttcagaaaccatagaattaagtagtgaatcagatttctcacaattcaaagattatatagatggactcagaatgtcttaattattatgaaacccattaaaatagggagtttaacaactccctattttgaagtcacaattttttttataagctttaaaagttcgtctctatttacttctctttggttttttctgtctttatactcttgaaagttaacaacttttgtatttggtttttccataaactcacttcccatttaacattattaacttatcttaatatattttattctatacaatttatctatttccttctatttataatacaaaatttcttaaataatcccaaattttcaaaacaaaattttcaaaatatactaaaatctacctttcaaatataatatcaaataaaatttaataatctttatactttatagtataatatactcataaaatataataaaggagattttaaatgaatatattacaaaatgaaaatttaattatcgaatcaagcagttttggtgctgaactaactaaaatattttctaaaaaatacgacaaaaacattctttgggatggtaataaaaaatattggggtagacaatcacctatattgttccctatagtaggtaaactttttgataatgaaacaataatagaagaaaatttatatagcatgactcaacatgggtttgctagagatatggactttgagattgtagataaaggagatacatttgtatcttataaattaacagataatgaatccactttaaagaagtatccatattcttttgagctaatcataaactatacattaaatgataatagtattgaggtagaatggattgtaaaaaatactgactctaaagatatattcttttctataggtggacatcctgcattcaaccttcctttttacaaacaaaatgatttttctaaacactaccttgagtttaaaagtaaaaatgatgtagaaaaaatcaatttaaatggttcttttacagatgatataatacctattggaaaattaaaaaacttacatttaaatccagaagtattcaagaatgatgctttgatatacaccaacatagatgaagtgtctatatataataatgatggtagtaaatatgtaactatatctatggaagatttccctctagttggtatttggactccttattatagtgaaactaattctactgctccttttttatgtatagaaccttggtatggtcttgctgatagtataaattctaacaaaatttataaagataagaagtttattaataaacttagtaagggaaaagtttttactgcttcttacaatataaatatacactagataaaggttagctaacccgttcccaaaataataaaatatttttatataagttaatataagggtatgaaataatattatttaatattcctcaataatattccttaatcaaaaaatattactggaatacaaaattccagtaatatttgataactaaataatgtgtttttatataaaccatagatactttttttatgatttaacaatacatacttatatacgtttttttgattctatttagagcctcatttaatgtttctctaggacaccccacattaatacgaataaatccatctccatctttcacaaaataacttccaactaccatagttaagtttgcatgtctaaaaaattctttagattcttcttcatttctaaatacttctcttacatctatccaggctaaaaaagaagagtctgacttcatcactttggcttttggtatattagtttcaaagaaatcataaactatttcaaaattctcctctacataactagtcatagcatctagccattcttcgctttcattgtatgctgcaactattgctggtattgcaaatacatttggagaagttattgaattactttttagcctttctaataaagtctccctaatttttacatctcttattaatacatatgatgtttttaatccacctaagttgaagcctttattaggagatacgcagattatactatttttataaatttctggatgagcattccacaaagatacaaatctataatctttaaatattatatctctatgaatttcatcacttaccaaaattacattatactttaaacataactctgacacttgatatagttcttcttttgtccatatacgacctgatggattttgtggactacagaatataagtaatcttatattctcgtatttcatttgattttccatatcctctaaatctaaataatatctattgttatctaattttaatgagctacaacacaactttctattattatttgctacagcctctgcaaaagggtcataagcaggtgtatttatcaatacaccctctccttctttagtatatgcttgaactatataatgaagggttgaaacagtaccaaaagttaattttatccaatccttttctatatatacatcaaatcttcttttattccaatttataatagcatcatagaagtcatctcctataaaagtataactataatctcctactgatgctctttttaagatagattcttttatagcaggagcacactcaaaatcgatatcagctaaatccataggaattgcatcttcatttaagccgaatttttctttaatcacatggttgctccattttctacaatttccttctttacgatttaatactttattaaaattatatttcataattttactctcctaatattataaactctttggatgtcttattgagtggaacaccttttccatctattataacaatatcatcttctattctaactccccctacatttggaatataaatacctggctcacaagacattaccattccttccactaatatatcttcactatttggatttaaagtgggaacttcaccatctccaagacctataccatgacccagtccatgattaaaatattcgccaaatccatgtttatctataatttttctagccactttgtcaacatcacttgccctagttccttcctttattgactctattgcagataattgtgcttccaatactacatcatatatctctttaataattttaggaggtttacctatagatattgtacgagtcatgtctgattgatacccttgataaacaacaccaaaatctattgttatagcttcattcactttcaattttttgtttgtaggtcttccatgtggcattgcacctctttctcctgataccactattgtttcaaaagacattccacttgcacctttttttaatgcatgatactgaattagagctgatacttctagctcagtcatatcttttttaatttcagaaataacctcatcaaatacttcatctgtaatctcacaagcctttttaataagttcaatttcttctttagattttatagcccttagcttccataattcatttgttattaaattgatttcaaaaccttcattttttagtgaaagatactcttgtatactcatagcttggttttctattgctaacttttttatatttaattcttttaataactcaattatagttggtatataagaaccttgagatacaatcctttttatgaaaccagtcgtttttttatctgcttcatcaatatatctgccatctagaatttgataatttttatccttagtaacaagcacatatacaccactacctgataaagctcctatatatcttttagtattttttgctttaatcaaaagagcgtcaacacctcttttatagattaaggatactaatctctctattgtattattcataacaaaatattagaaatccaatcctaaatcatccaataagtcttcttcttctttagagaatatattcttagtttcttctttttgttttttattattttgttgacgttccattattttaaagaatggccaatataataaaactgctaatactaattgcaatgcatttgctaatatagaatgccaatctccattagttaaaaatccttctaagaatacccctacatatggagggtcaaatactggctttgctaaccatccccagtgcataaaaaacattggtagtgtacctattatagctccaccaaatacatgtggtataaacattattggatttaatattatcggtgctccaaataatattggttcatttatcccaaataatgcagggaataatgatacacgtccaatcttcttataggaagcattttttgataacatacatgcaattacacaacctatactaattccacatcctgtaaatccaaagaatgcacttgaagctcctgctgtaaagaaatgaggtattgtttctccagcttgcatagctgctatgttttcagctataaatgtaatcattataggtctagttataggactaaatactgatgaatgtattccaaaaaagaatatagtacatatagcaaagttaagtgcaagaactgaccatgggttatccatacttcctactaatggagataaaaattgagtaagtatctgtggaggtaattctccaaatacttttaatgaaataaaacgagcaactataaaagttccacaaactattatagtagtaggtattaattcaaaagacctagatacaaaatcaggtacattttctggcatttttattgtgatattcttcttattacaaaaattatataactccacagaaccaagccctgctatcatacctgtaaatagccctttagctcctaaatttcctatttctaaagctccatctggtgtaaatgaggctactaggaataaaaaagaaaaagttgatagtgcaacacaacctggtatatataatttatagtagttccccagattaaaagcaatacacatacaagcatataatcctattaaacctatggaaagacttactggtaaatccaatattgctgaattgttaagtatgaatttgcttattggattattttctccaagcatatttggaagtgctggaagtattgcaaatatacttcctaatattgtgaatggtgtcatagcaaccataccagcctttatagaaccaaggtgacgttgattgtcaaccttatgagctaaaggcataaatactctattcataaatgcttcaaattttgaaaacatatctaatctcccttttccctcattatttttattatccttgagctaattgatgtttcttataagttattaatgccaacttcataactgtagctccatccatttttccatatacatctttatctattactgcaaaaggcttattttttggctctaatattccttttaagaagtctattttatgagctatttgaggacctataagtactatatcccaatcatcaacttcactttctattgaatctgctggtatagctgtaaactcaaaatctttttcattgagtttagcactctcttttaccacctttttcatattttgcattaacatattagtagaaaatccacctgcacaacataataatattttcataataattcctcctaaagtttgtatttttattatctcttaaaagcatctaaacttttaaaagaatttttacataaataatctatttctacattacaattacttatcgagacaatatatcaaagcctctatcaagtcttttgctagctgagaagtcatatagtggtcttgagcatgtaccattaaaagactcattgttgggctttcaacatcttcatttaaatcttgagttattaattctgtctgtattctgtgagcctcaatatctattttacgagcctcctctattaacaattttgctcctttaaaatcttttgactttactttttttaaagcctcaaaagctttcgatttactctctcctgcagttgatataagctccattatttgtacttctgttgacattttcttattctcctttagataaaatttcttatatgtttatattgttcttcatcaaaatttaaaattaactgtgtatacaatcttataatgttctctaaatctttattacttactattgaaaatgcacaatgaccatatctaactggtacacaagttactacacaaggtttcccttcatttacgagatgtgcttctcctccatcagtcccacctgattcaaacatatcatgttgaagtggtatattatttttatcagcaatttccattacataatctatcatttttctactagggactagagtcctatctctatgcattagcattacacctttatcaatttgtttctgatttgtatagtctctcacaaactcatttttagcacatgctacatctattacaaatactatatctggatttattaactgtgttgatgtctttgctccccttattccaacctcttcactacttgtagccgcaaagtgaatattacaatttagattttctttcctaagttcttttaaaacttctcccatcacaaaacatcctatcctatcatcaaaagcctttcccactaatcggtctggtaaagtaaattcctcaaaacttgttgtatatgttaccatatccccaacattaatccctaggttatatacatcttcttctgtatatgctccaatatctgcatatatattttcagccttaccattattatatgtagcatttatgacagcagggattttctttccttcttttgttgtaattctaactttttgtacaaactgtgcaagaggttttactcctcctattgttattaagtgaatcataccaagtttgtctatacttctcaccataaatccaacttcatccatatgagcacaaatcattacgtttggtgcactctcatcttttattttagaaaagatgatactccctagcccatcacagataattttatcactataagcctttagttcttccaataaaacatgtctaacctcttcttcattagatgctataccatctgcttctgacaacctcttaaaaaactctatattcatgtctaacctcccagatagatttttaacttatacataaactcttcataagattgtgacttatttagcatgtctaccatatccttatttgccataatcttacttaaatatttagatatttgcttatgaagttctaaatttccctttattaatgaaatcatgaaaataattttgggcaccctattttcataaataatatcagtttgtatcaaagctactgatattatatttttgtttcctgtcatctcgattggatgaggtatagccaccccatttgtataaatagtactcaaatagctttctctttcccatacatctttgggataggttggagaacaagctccctcgtcaactatacattttgacatactatcaaggatatccttatacttagctttatcttttatacacctaaagtgattcttatcaaatagacctaatatatattgttttgggcttgatatatttcctatatggtctgcaaatctaacactttctttaatatctaaataatccaattcgtctaaaatttcatttataagtataactggagcatttatttcaaataaaagatttgttattgaaaaaatcaaatctggtgcaaattctattacagctttttcttctagtaatgaaaaatttcttatctcagcatttggaaaaatttctttaagtcttaaatttatcaaaaatgcactacctccaccagaagagcatattattgctattttatattttttattaaaattagcttcttctctcttttcaaaaggaacagcaatgtgagtagctataaaccctatttcatcttgacttatttttatatgatactcattttctatgatttttgaaaattgaatagataaattaaaaacagttggatactgttgacttattttaactgaaaaaggatttattatcttgtggttcttctttatacgttctattaaacatgcaatatgtaagtaaaataagttaaaaaactctttatcttctaaaaaattagagttatattttttatctatctctctaaaaaattcgaacataatatcttgaagtttattcttatcaatattctttatagtggctttcttatctttagtctttagttttataagctcctttaaataatacttttcatcataattaaggttatattttttatctctaaaaattttatctaataatttatctataattaaatcttctgtatataattttaaattgctagcatttcccactactctcatactaactcttatatacaatataataatttgtgctaatatttcctcaagttctgttaaatttgcttctaaatcatgttcattaagtacattttttattgtacttctaatattagctaattttaaattatctataaacttattcctgtactctgttatatttctattccctctaaaataactatccaccaatatactttgaatttctttaatagaaccttctattttaattccataatgagcctttcgctctagttttaattctgtatcctttatcttttcatctatcttttttaaatcattttttatttgggatgaacttactagaaattttttacttaactgttctatagttttataaccttcatttactaaaagctctactattatagactccaaccgttgttctggattttcaactaaatctgagggtaagtttcttagataatgctcgaatttatcttggtctttaatatttagaatatatcctaatttagacttatattctaatttaaaaccattacattcttttatagtttctatcttttttatttcatttctgatagttcgagtagatacccccaacttatctgcaaaataatctatgtttagataaccactactattttttaatgtttcaagaataatgcgttctctcatatccccacctccctcagtgttattattgtgttttttaaagtggtataaaaaatattttttataaaaacaaccttttctttttatttaagaattttatatcctagtatattttgattccaaaatttaatatacatattttataataataaaatatatagttcaatttttattatattttaattatatatgtaatactttaccaataaaagctgatatttttcatcaattaaatgaaaaaaatacaccatttacatataattaatataaatttttcatataacaaatatcctaaacttatctaaaataaatttaggatattttatttttatactctatttacagacccacacactttaatcttttcttttacaaaatccttcactgattgaagccctgctaatccatactttttagggtctataacctcagaatcttcatctaaaacttttttaacccctttactatatgcaattcttaattcagttgcatagttaacttttgcaatacctctttttatagcttcttttataatatcatcatgtattcctgaacctccatgcaatactaaaggtattgaaactacatttttaatttctgataacctatctaaatctattttaggttcacccttatacaatccatgtgcagtacctatagcaatagccaatgaagatattcctgttctatcgacaaactcttttgcctcttttggatttgtataatcattactattcccgccatctaaatcatcttcttttccaccaactttcccaagttctgcttccactggtataagagaaggactacatgcttttactactgatttagatatagatatattattttcaaagctttcatgagaaccatctatcattattgatgtatatccacttcttaaagctttcattgcaaggtcaaaacttgaaccatggtccagatgcattgctacaggtatctttactctttctgcagcaacctttgcatttgctagataataatcaagacctgcatattttacagtagatggagtagtttgtaatattactggagagtttaactcctcagctgcttctataacagcaattaccatttccatattttctacattaaatgctcctactgcatacccctcatcttgtgcctttttaagcattgatgttgttgttactaatgccacattgataccctcccaaattatttagttataatattttaatcttatcttttaatattcatatattgttacaccttttactactctatttactgttcctgtagctgatggcgtatctggcttatttccaacctttaccgatacaaacaatgctatagtttgtgcaaacaatatgtatggcattgcaagatacacatctggtaatttattatacttttctttaaactcaaactttgttcctgagaagttattttcattttctactgacactgcacaagtgaatttagcaattttatccctttttatctcctctaaaacatctaaatcatattttcttgtatataaacagttagatacaaattcaaatacaagtgtattttcatcaataaatgattttggtccgtgtctaaaccccataggagaatcatacaccgtagatatttttcctgctgtaagttctaaaagttttagttgtgcttcttgtgtcaaaccacctaatcctcctgaacctaaatatacaactctatcgaaatctttatttattaactcatgtatttcatcttttctatctataacatttcttcccatttcaattattgcatttatatatgacttttctacatcatcttctaaactatcgaatattaacatagcagataacatcatacacgaaaaacttcctgtcatagcaaagccttcatcatttgattttgatggcattaataacaagtaattattttcgtcgtttttagtcattttagctagttctccttgcggattacaagttatagctaaatgataaaaattatctacaatcttattccctaaatttaaagcagccaaactttcaggactatttccacttcttgcaaatgaaattaataatgttggtatatctttttttaagtaatcatatgggtttgaaactatatccgtagtaggtattgcttcaaatatgtattttcttatgtcatttttattcttaaggtaaggaagtattgaatttcctatgtaagctgaagttccagcacctgtaaatataactctaaactgcccatgattattacttattgtatctatgaatctatttaatttttctttgttagatttatatatttcataagtctctaaccataactcaggttgttgttttatttcattagttgttattattgcacctaaatcttttagtttttgttcttctaatttaaacattttcattctcctttcatacttgtaacgtttacatttggtaatgaggttataaccactttaaactataaaaaaatatactcttttataattttttgcttagattttttagtactacttaaactcactataaaatatacgctatagattttaattaattttatagtttatctttaaaaatttaataaaatcatactttagtatttttattttacgataaaaacttgttcagaccaaagtggtaattaccactaatccaaatataaattaatttgaattttttgtcaatacataaaatatttatatcaatcaattttatagatatcctacaaaattactttgtcaatatttcttatttcgttaatttacttatataagctttaaatttattttttgatacaaagtttacaaatttatgtgtctgaattataatcaattctgtaaatataaaaaccttaggagaaagtattatgaaaaatataaaaatgggaatgataggtcttggctccatagctcaaaaggcatatttacctatattaactaagtctgagagatttgagtttgtaggagcttttactccaaataaagttaaaagggaaaaaatctgtagtgattatagaattatgccattcgattctattgaatccctagctaaaaaatgtgattgtatttttctacatagctctacagaaacacactacgaaattataaaaatattattaaatttaggtgttcatgtatatgtagacaaacctcttgcttcaacagtaaatcaaggagaagaacttatcgagttaagtaagaaaaaaaacttaaatttaatggttggattcaaccgtagattctgtcctatgtacaaagaaattaaaaataatgctacagaaatcgtatctatcaatatatgtaaacatggattaaattccttaagaaatgttagattcgacagtacccttatagatgactatatacatgttattgacactgctttatggttagcaaatgaagatgttgaaattagcggagaagatttatttttaacagacaataagaatcttatatttgtaagtcataaacttaaaggtaaacatttctctgtaaacacctctatgcatagagattctggaacaaagttagaacaagttgaaattctttcaaaaggtaagattcaaagagttaagaatcttaatgtactggaaatagaagaaggtggaaacctaactttaaaacaaagtggtgcatgggtaaatatattaaaacaaaagggttttgaggatatatcaaatcattttattgattgtatagaaaataatataaaaccagctattaatggagaagagtgtatcaaggctcaaagattactagagaaaattataaattcagtaaaatagatatttattataaaaataggttaaaaatgaatttttctaacctatttttatataagactatatcttttatattaaaattaaaatctattacaacaacattaaatttattatattcccattaaatttatttaacttaacttttttacttcaactaaatcttgatatttatcaatttctcccaaatctacaaatccagtttccatatttaaagcattacttataccgcaagcatttgcaaatttaagtaaattttctattttataaccccttaaaatacctacactaaatccagccactgtgctatctccactacctacagtatttatacactttacaactggtacttttacatcatatacattatattcgtttaaatacaccataccatcttttcctaaagatatacatacattctctgcacccatttcaataagtttttttcctgacaagataatttcctctcttgattctatatttattcctaataaatgtcttatttcatctatatttggctttattaaatatggttttgattttaaagctatttttaatgcttctcctgatgtatctaatataaattttatattatttgctctacatatatttcctatcttttcataataatctatcggcatattctcacaataactaccagaagctactagtattttagtattttttagtacttcctctatatcattttcaaatctctctaaatcgcttttttctactattggtcctttttctaaaaattctgtactaactttattgtcctcaattatgtttaagcaatttctagtttcctgctctatttttgtaaatttattttgtatatctagttttctaagttcattttttataaattctccattaaatccacctagaaatcccatagctaaaggattttcttttaaaattttacataccttagctacgtttaatcctttacctccagcagttgcattcttacttactaccctttgcacctcacctatgtttatattattcactttatacattctatctatagatgggttgaatgttattactgtaatcatactagattctcctcattattaatttttacttttctaaacaataaattaatctgtaaaataaaaaatacctcatctataatatacccaaagtggttattaccaatttgaatataaattattttacttgttttgtcaatataccataattttataataaattaatagccttacttattgaattttgattaaactttattcattgacataaataattctatattctataatcaaattgtggtaataaccacttagaaaggactatgtttttatgataaaaagaaatgataaaagaccaatatatgaccagcttgttgagatattaagaactaagattgaaaatgagatggaaccaaacgatagaatgctttctgaaagaaaaatttgtgatgaatatggagtaagtagaaccacagttagactagctatggctgagttggaacatatgggatatatatacaaaagacatggaaaaggaacttttgttgctgcactaagtcaaaattctcaaaacttaatggaaagttatagctttacagattatatgagaatacaaggaaaaaagccaggtacaaaggtattatcatttgaggtagtagaaagtacaaagtatttctctgaaaaattaggtataactcctggtgaaaaaatgataaaaataatgcgtttaagacttgctgatgaccttcctatgatgcttgaaagaacatatcttcctatgaaagaatttataggattgacaaaagaaaaaatcgaacaaaaacctttatatgaaatatttagagaagattatggcgagattattaaagttgctgatgaagaattttcagctggaataatctctgataaggaagctaagttattggaagtaccaggagattcaccttgtctgaaattacttcgtaccacatataatgatgacaatatagttattgaatttactttgagtgttgctagaagcgataaatttgtatatagagtaagacatgtaagatagtgaattaaatagctttcaagaaaatagaatgatattataaacgtcaatgccacaatgatagtataattataaggaggttattttgaaaagttttatttatgcagataaattttttatgaaacatggaatcaaagaaaaaggttaccttagtataattaatggcaaattcggtgaatttcaacaagaaagacctaatattactgataatgtcatagatttttcaggtaaatatattgctcctggcttagttgatactcacattcacggtcttttaggtgcagatgtcatggacaatacatttgaagcaataaacacaatttcaaaaggcttattaaaatatggagtaacatctttcctacctacaactttaactgattctgtagatacactaagtgattctgtagaaaatataagcaatagcttcaatcgagttgagggtgcaaaaatacaagggatttatttagaaggtccattttttacagaaaaatataagggcgctcaaaatgaaaaatattttaaagaccctgacatcaatatattaaaattatggcaaagaaaatcgaaaaatttaataagaaaaatagcaattgctccagaacgtaaaggttcaatagaattaacaagatatgcaactaaaaataatatctctgtttctcttggccatagttcagctacatttgaacaagttaaacaagtcgttaattcaggtgctaaagtgtttgtacatacatataatgggatgagccctttaaatcatagagaacctggaatggttggggctgctatggtactaaaagatacttatgctgaattaatttgtgatggtcatcatgtaagcccaatagctgttaaaataatgatggatgcgaagtctagtaataacatagctttaattacagattgtatgagggctggtgctatggaggatggaaaatatactcttggtaagtttagtgtaaatgtaaaaaatagtgttgcaagattaaatagtgggagtttagctggaagtgtattaactatggacaaggctgtgagaaatatagttgattggaacatagccactttagaagatgcaataaaaatggctacatatgttcctgctttaagttgtaatattgataatgtctgtggctccatacatcaaggtatggatgcagactttatagtaacagataagaactttaatatatacgaaacttatataagtggtatatgtatgtacaaagttaataaatagattcaatataaagttatggaggcttcctaaaaatagagataagtctctttttcattgttaaaatgatgaaaatacatttgatttcatacaaaaagagtgcctcataaactaaaaagttaattttgagacactccttttattaaggttctttattttacaatataagtttataaaattaagaatctggaaatatttatgtgtattctttgaataaaaatttattttttagtgataattaaacatttattggtaaggctatggctttaaaaatcatagccttattttgatattttttccatttttgtaaaaattattacccctttaagaaaattccttaatttttttgaaatatttctttattaatttagagttaaaattctttcttcaaaataaatacttaaatgagctaagatttgagtccaatttctaatcttttgagtccatctttcagaaatatccatagttgctaagtataatgatttgtgcaaagaatcatctaaaggaaaaatagacttcgatttagtaacttttcttaataatctattgtaactttccattgaatttgtagtatatatcaatgttcttatctcttgaggatatttaaagtatgttgctagctcatttcaattgcttcgccaacttcttaatgctatcgcatattgattaccccatttttcctctaagagcgatagctcacttaatgctacttcctctgtaattgcagcatatactttcttttaatcttttgcacattcttttctatttttatatgatacataatttaaagtatttctaatttgatgtacaacacatctttgtatttcagtatcaggaaatactgctttaattgcatcagaaaatccaactaatccatctacagaagttattaatatatccttaactcctctgtttttgacatctgtaagcacctttagccaatactttgaactttcattttctccaatccatattcctaagacctcctttataccttctaagttaacacctatggctatatatgcagctttgtttattattctaccttcacttctaactttataatgtatagcatccataaatacaattggataaaccatatcaagaggtctgttttgccattcatgagctaaaggtagaactctatcagtaattttagctactagagaatgagatatatcaattccgtaaatactcttaaggtggcttgatatatctcgagtagacatgccttttgagtacattccaatcacttggttctctattcctgatatatcatttttataattactaattacctttggttcaaaatctccatttcggtctcttggaatatttaaagttatttctccaaaatctgatttaacatttttatttctatatccatttctagagtttttagtatttttattcttattgccatatctatcataacctaaatggtcgtcaagctccgcttctaacatttgatgaattgtactcgcaaataaatcttttagcatatcttgaatatctgtagttgttttaacatcatattcttcaataagtttttttaatatttcgtttttgttaaacataaaaagtgtgcaccttcctttatatagtgatatttaatattttaattatcaccactttttagaagaatacacactttattttaaagacccatttattgtaaagataaagcatggtctaaaatttcaaattttagaccataatcttatgtttttagataggcctaaaatatttagattagaaaataatcaattttaagacatccctattttatttataattatgtacattttacactatcagttaattagaattatttttattcatatttaaactattcaaattgttttcccaattttttatctccttcttaatgtcttcacttaaagtatcacttgaagacactttctttaatttatcattcaaagatttcttttgttcttctgaaagatctgtttttattgtaggatcaataatatctattacatcttttatatcaaaatcaacaaatttgcataattcatctaaatgatcaattaagaattctatatattcatatgaccattctttataattttttttgttttttaacatgaactcattaatttcataactttgatttgctaattcaaagaatgaacctgaaggatccattatgtcatttatagagttttcatagttaacaatattaatttgtcttattaatttctctttttctgttaagttactataatttttgttaacaaaagcaactaatccaaattcaaaatttaaaattgaatctttacgctgttttactgaatcttctccaaattctctaagaccttctaaatttttatcaatagccttatctctaatttttgttaattgttctatacttaaagcttctaagtttttaggcactatttcttcattatttttagcaatttcttttgatttatcatttgtatttctattattgaaaacaaatatagcagtgaataaacttaaaactattactaaaacaattaaacttacattttttttgtttaacatatcaaatctcctttttaataagtattttatttgtgaaaaaataactcagtttattagaataacctttattactgattattctaaagaatacaatagaacacttttttgatatagtttatataattataacgaatgataaactaatttttagacaaatttatataattcttttattaaatttttaaatcataaaaaagagactaaattccactagtctcttttttatgattatgtaataaaatttaatagctgcttcaactaaatacttattggatcttgaaatagatatttattcttttcaattttcatttaattaaaagtataaatttttatttattcccaataaactttgtaataagaaattttctttccttcaagtttttttaacaaatttgttcttgcaccttcatctgaatgtgcagcatatgaaaaattatatccatttgaatgcttatctgtagatattagtgtatgagttgctactccactactatttaatatacttacaggtgttgctggtcttaaaaaacttaaagagtttgatacagtaagtgtttgatatgcaattcgattcatccaatgtattttaaattctcttgctccagcccaagaaggtgatctattactagtagaataataataccatggattattattcgtccagaatgttactccagcttcatgtaagcattgtgaaacaaagttagcacaatctccatatccatctttttgaaaattataatatggagaaggtgcattattttttctatttgtactaccataataaccattagtatagccatgttttttagcataagctaatgcttgttgtctataactagaagggcttactcttggtaaaggttcatttgaatttttctcattaatatttaaattattttcccagttttctatttcatcttttatatttgtacttagagtattacttgaatacatttttattaattcattatttagagatttcttttgattatctgaaagatctggttttattgaaggatcaaccatttctattacatattttgcatcaaaatctacaaaattacataaatcctctaaatgctcaatcaaaaactctacatattcatacgaccactctttatagttttttccattttttaatacaaattcattaatctgataactttggtttgttactttgaaaaaatcgcctgaaggatccattatatcatttatagaattttcatactcaacaatattgatttgtcttattaatttctctttttctgttaagttactataatttttgttaacaaaagctactaatccaaattcaaagtttaaaattgaatctttacgttctttcactgaatcttctccaaattttctaagaccttctaaatttttatcaatagctttatctctaatatctattaattgttctatacttaaatcttctaagtttttagagaccatttcttcattatatttggttacatcttgtcctttcacattagtattttcatcagcgaaaacaaatacagtagttgataagcttaaaatcattgtcataataattgaacttatattttttttatttaacatattaaacctccctctttaatatatgtattaatacttgccaaaacaaaaatcatattctactaaaatttaaaacaagtttatcaccgtttttttctaaaagagcgtttactaaatatcataatataatcctccctttctagtattatttatatatataacgaataaagaatcgttttttagacacttatatataaatttttttattaattatcaagaattaatttttaagtaagatttaattatcaagagtagaatcataatatataaaataaacaatcaaaaatagtgtaaaaactaatactttttgttaatattaatagataaagataaactaaggtggtgattaaactgacaatagaagaatacaaaaataaatactctactggagataaaattatactttccttaaagagttttgataataaagaactatactatcatgaaactgataacatattaaattcaaaagatgaaatagatagattaacatcaagcaagatatttaaaataatagaagataaaaatgatttagccttagagtcttattattctagtgtaatagaaggtgccttttcaactagaaagattgcaaaatctataattagaggaaagatgaaaccaagtaataaaagtgagtatatgatttacaataatcatagagccttagaatatggattagataatttagataaattatatagtcacaaatttatatataatttacatcatatattgggtgaaaactgtttagattcagaagaatatgaatatagaactgaaaaagtatatgtatgtgattcaaaaggtgagattatacatacaggacttgatcctttgaaaatatataattttatggatgaattaataatttttatggaaaatagtaaagtaaatgatttagtaaagagtacaataattcatttctactttgtatatgttcatccttttagtgatggtaatggaagaacatcaagagccttatcatatctatatttaattaataaaggatatgatacttttaaagagttttcaatatcatatataatatctaaaaacagaactaagtattataaggctatactagatgtagagaataaaggatataatttaactgtatttatagagttcatgctaaagtctataatacaatctatcaatgaaatgcgtgatatgcatgataggaagtctttagagagtatattaaaagaggaattatttgaaaatgatataactctatcagcaacagaagaacatatattaaaatatatctgtagtaaagataattattctatgacattagagaactatatcaaaaagaataaaggtagatacttaaaggctggaataaaagaaatcgaattagttgaccagttgatggaagtgtttaataatcttgaagaaatagagattttatctagagaaaaggatgtatataaagttaatgagaagtacttgaatatgcttgaaataagttaaattgaagcatataaaaataaaaagtatataaagttatataatataataataagccctctatgaatcgctcttaattgagttttcttagagggttaaatttttcattcttaaaataaaaagatttttattttgtccaaaattacttttattattcgttatatatataaataatcttataaggaggtctaaattatatgatattaaataaaactattatgaaataagacaaggtttgattgtgaagttatataaaaagattatttttaatataactaacaggttatatgacagtgtttatagaataaatatttaagtaaaggtagtaaaatattatgttaaagaaaaaaataataagttttttaatggcaggaatatttgttttatctagtggatataatttggtttatgcatctacttttgaagaaaatgaatataaacaagaacttgttaatgaaaacgaatttactattattaatagcaatgaaaatgaaatgattgtggataaaaaaggcaataacacttatgtttcaacaaaagttacacctggtagttggaaaaatgttaaatatctaggtcaaaaatcacgcaaattaagttctccttatacaagagaaagaattatacaaactattcaatggggattaggttatctttctggagggtcatcttttttattaggtttagctgagagtatttatagagaaaaagtatatgacattactaaatatggaggcgtatatacaaaaacatactataggagacaaataactgatattagaaacagtcatgctaatgttcctgttccatacagatatgaatatgttacatatttttatagctcatctaactttaaaaaagttgtatatactgaaagagtaggagatggtataaaactagcaaataactaggaggaaatatatgaataataagaaaaaatcattcttgatttctggcactataaacgtaattttattaatcattgtttttgcattgtttagttataatattatagaaaatagtacacgaaatatgataataactgtaattttaatttttatttttgaaattataaaaataaagatactagagaaatattataatctataaacaagaaatatctttcctaagagcatattgtaaagtatgctggtacaaatttacattacaaactatctattctgatgtaaaaataaaatcaaaactccaattaatttacaaaaagcatggcaaatctttaactctagttttacatttatgctataatattatttatagagtaaacataggtggaggtatcaaagatggtagtaggttatatgagagtttcaacagcagaacaaaatgaagatagacaattagttacaatgaaaaagcataatgtagaaaaaatgtatcaggagaaaataagtgccaaagatactaaaagatcaaaactaaacgcaatgttagattttgtaagagaaggagatacaataattgtacatgactttagtagacttgctagaagtactaaagacttattagaaatagttgagctcttagaaaagaaacatgtaaagttaattagtgataaagaaaatttagatacaagtacacctacaggaaaacttatgcttacaatgcttggcgcaatatatgaatttgagagaacaaacatgttagaaagacaacgagaaggtatctctatagctaaagaacagggtaaatataaaggacgtaaagaagttaagatagacaactttggtagttattatgatagatataaaactagagaacttaataagactcaattggctaaagaattgggagtaagtagaccaacattagatagattaataaagagccatgagagtaactaagaagagcaatatatatgcttaagttaattttagtggggcaaattcatagaattatgccctttaattatgtttaaaataattataaataactgtttttcagtatagggggtatccttctatttcaaaaaagtattatttatagaaaatgagttctagaaattttctagcaaaaattaaaaaccagagacatatttcaaagagggtgattttattagaaaaaaatttgcattgtttattttattaattgtattactcactgaacctaaaaaaatagaagaattaagaggaagtaaatacgagtggataatttagaaagaaatatacaattaatatttagttatatggcaaagacctttataagaaatggagcaactataagagaagctgaaaaagaagcaaatgagattataaaaactaattcaagcaatctttggggagttaatggcctagcttatcagcttggaaaaataaatttagaatttttctgtatgtattttatacaagacacatatttaccaaaagaagataatgttgctgctcctatagctaaagttcatcatgagttatgggaagatatacaagagtctataattggagatggttcacagcaattaggaagaatttatccaagaggaacaggtaaaagtgcatttggagatttagcaacaactgtatggtcacattgttataaacataagacatatactttaatttgctctgatataggctctacagcagaaaaattcgtaaaagatataaaaaatgcattacttgaaaatgagtatattaaaaaagcatttggagttctcttaaatgataatgatagaaaatatatttgcaatagtactcaattagaattaactaataaaacctttattgaagcaatatcatcttcatcaccaatgagaggaaaaaaatacaataataatcgtccagatcttatcatacttgatgattatcagtcagaagaaaatgttagaacagaagatgctagagagaaaaaatttaaaaaattttctgatgatgtaaaatatgctgcttaaaaaccagtaataagaaatggtaagattataaaaagaggaacaacttttatagcattaggaaccttacaacataaagaatgtttctatagtaggctaaagaatttaccaacttggaaatttaaatgtgaaaaaggagttttagttgataatgtagatgaattatttaattctggtttatggcttaatttcaaagagttgttatttgatttcaaaaacacaaatcatcttgaagatgctaaagaattttactgggaaaatgaaaaagaaattaaatttcctatattatggccaagtttttggaattgtttagacatggctttaagttattacgaaaacccaacatcttttaaacaagaggtacaaaatgatgtaaattcaataggtgagaaatggtttaaaacaatcagaacttaatctagagaatgtatagaaactcatacattcaaaaagacaatgttattatgtgacccagcatctgcaggtggttctaaacatgactatagtgcttttcttgttggaagtgaatcagaaaatggtttactatgtggcagattggcagaactagccaaaataaatgctagaactgattttgataaatatatattgcatatgatttatttattaaaagtgtatccagatataacacatgtttatatagaaaaaaatacatttaatggtacagctgctaatcaattagaacttaaaataaaaaatgatgatgttctttactacagagatatagaaatcattaatgagcaccaaaagaaaaataaagatgataaaatctctactttaatacctgttttaaataaaggtcaaatgatttttgcagaagaggataaggcatttatacagcaaatccttaattttacaggacaaaagtactctctacatgatgatgcaccagatatatcagcagaatttataaataggatttttaatattaaagtaaatgaaagtattacactattagatagaagaaatttaggtctttgattgtatggaggtgatgcattaaatggaaatagatttaagtttattaagagaaatatatgaagactagagtttaaaaaagcaagaatacaacactatgtataagtattataaaggtgaaacagatgctattagtaactataaaatggttaccaagaggtctaataataagataaacactaatttcttaaaaaagtttattaatgaagaggtcgcttattctcttgcaaataaaatcacctatacaagtagattaggtgatgagaagattataaatgatttagaatactatacttgccattggagtaaaaagcacgattcagatttattgagatatacactattatttggattttgctatgaactttactatgtaaaaaacaatgaaatgaaagtaagaataataaaaccaacagatggctgccattatgaaaatgaagatggagagaccatctatttttttagagaatttaaaaaagattttaaagatgatatttatatagatgtatatgataaagaatacatatatcattttgattcaaattttaaagagatagaaaaacctacagtaaataatatatttaatggtaatgttccaatatcaatttgtaaaagaagtgaagaactaggaaaaaatacaatattcaatgatataaaaggattacaagatgcttatgaaactaatttaagtgatataagtaatgaaattagtgattttagaaatgcttatttaaccttctctgaatgtaatattaaagaagatgatttgccaaggatgaaagaacttggaatacttcaagttaatggagatggaaaaatagaatggcttattaaagacatgaatgatacatttgttcaaaatacactatcttcaataaaagaaaacatatataaaattacatctcatataaatcacaatgaaaaaatgcaaagtaatacatcaagtttagcagttgtagcaagattaatcagtacagaatggatttgtagccagaataatgatagtattgcagatactttatttaataggtacaaattattgtgcatttggcttaataaaaaatatggttttgactatgattataaagatattaaggctaaatttacccctaagataccacataatgatttagttgtagcaaatatattaagtcaacttggagataaattatctactgaaaccggattatctcaaccaagttttattgataatcctcatgcagaaatggaaaaggctaaaaaagaacaggaaatagtttcagagggagagattttattagatgaatcaaaagattataactaaattgactgaagatatatataaatctgctgaaaatagaggtgcaaaatcggacgtaagggaattgtattggcttagtcatacaaaagctccagcgatattaattgaagtatgttttgtagacagtaaagcagatacagactattaaagacatagttgctaaattaatagcagaaggtattttgaataaaactatagataatagcgagggaaaaatcatgtataaacatacaatcatttatgatggagaagctgatatgatacctgcaactgtgattggttggggttataatgatgggaaaatactgatatgtgatataaaagattatataccaggtcaaacagaaaatttatatataaattatgtttcattttctataataacttattttataaaatagagtgccaatataaaaaagtataaatattatacacctattttatattggcactctatttaaaattaattatatttgcttttaaaaaactattattcttgtttactacaactcataaatacaatatctatttttaatatttctttgtactacttattatatttttactttcagagttagcttttattgtggaatgaactctgtaatatccttttcctatagtttttgacttagaaagagaacatgaaatatttcctgaagcattccatgtttggattgttgaccatgttttcccattatcattgcttttctgtaatctagcaataattgatgtgcttgtaacatttgatgctcctctaacaaagcatgttactttagctgtacttcctgaaatacttaaattgcaagtaccagacttaatataagacattttcaccatagtatcatctatatagtttactgctgaatattgttcaatattcttatcttgatattcatcagcaaatgcaggtattgcaactgctgatgaacatactaaagcacacataccacttataactgtttttctaagattcataaaatcacctcttcatttgttttctatttatataacttatataacgaatgaagaagtgatttttggacactaatgataattttttttattataattttaaattatacattttctttataatagaatgtctttaactataatagttatgaatatctgtaaataatatgtattgtgactatcccccaataaattcatgatttttattttacttataatattaaattgtaaacatctgaactagaccagattttactactaagactccgcctcctgttgtacttgtacctttcaatatagctttataatccccttttttaagatatttaacatctatttgtccagatatagttgaagatcctccaccacttattggatatgatgctacaagcatattttttgaatttctaatctcaacagttcctgaaaatagtataactattccttttgaagatgttatcctccaattaagatgtttacttgacatataacctatatatgcagttcctccactaccatgtgtatatgctttttcattactttgaaacactaatggcgcctcagcataaattgaatcattttcagctttttcattagcaaatactaaagttgatggtaatataactaaacttaaagtaagtaataacgcaaataatcttttcatgtgtattcccccagttttaaattaattttcgaatatcaaaggtttatcgctttccctcgatttaatgacaacatcataattatgtttagcaatatcaattgcacttaaaaaaggtgcaagtacactttcaataagagacatttcttcatacagtatatatccttttcctgcatagaaattagttaatttctcaatatttattttgcatagaatagatattgtttctaacgagaatttataatcgtctataagaaaacttaaatcttccataaatttttctagaacttcgttgtctctatacaatttattacttttacataaatataaatctgatttcattttttacacctcaattttaaagttttattcctattgcaagcatgttataactataatgtattaatttttcctataacaatatttttaacgctcaggtaaatgtagattttaaaaccataaaaatcacctcacattttcatatatacttgtataacgaatgaagaggctacccttggacacttaaaaaaattattttatacttttcgctatttttatcaaaatatcttcataaaattcagattctccactattttgataatctacatttaataaatatataaagttgttgtcattccaaaataactgtaagaaagttccttttactatatattttgctttatgcccatttacaaatatatctttaacttttgcattttctgtatctaatataatagaatttgaactaattttatctgttacatattgtatctcaatattttcatcatttctatatgtaataacaaaatcatcaactctatcaacttctttaaatccttttggtatatactcaggttctttattttttaaactaagattatcttctccattagttgaaaaaacaaatgaagttaagtcttcatatactcttattactaatctaaagaaacgtgaacgcaatgcctcactactcatagtaatagtaagtaaactagctaaaactattaaaaatacaatagctgtttgttttgaataaaaaatgattttatttgtaagactacttcttttttgttgcttaatgagttttttcatttttcgctcaaaaccttttgaaaaaacatgatttaattcatcatctgaaagaaggtcatcaataataatttttgtcgctattgggatactttctctaagcatatcatccgtaatatcaaaatcatcttttttattactcaatatttccaacctccatttcttctaatatttcttttaatttttttctagcacgctgaattctcttatatacattttcctcccctaaatttaatgcatttgctatttctttatttgaaaaaccatactggaactttaaggaaagcacttgaaagtaactttcattaagttttgcaagtgctatagctaaattactttcacatactttatcttctatagaaaaatttatctccctgtttttatactcttcttcaatatcagataccttttctctttttctctttctgtaaaagtctatagcaatcctttctactattataacgataaaagccttcgttcttggactgtctacctcatcaattttatctatatttttaattattcttaaaaaagcattatgtactgcatcttctgataaatgatcatcctttaatattttattggctacataaaacattatttgtctatacttttcatataccttttcaaactttattttatcttcttcgagttcaagtatagctagataaattaacatttagaattcctccaatataaaaattctgaattaatattttaaagttcaattataacataaatatataattaactctacttaaatagaatataactatgcttaacaagctttttaaagatatctagtaaaaaggcccttcaaatccattttcgggattataagggccttaactctacaaatgattctcaaagttaaatttttaaattaattattttcgtatatatctaattccataaaaattaatctttttttgttttgatgtaatagtatataaacaaaagtacatatgctaaaggtattaaaagcaatatttttaaatcaatatcaaatgtattagtataaaatgataatgcaagtgataatatcacaattatcaggtttggaattgtttttaaaaaaaccttataaagcctttttttcatattattcctcctaaaaaagcatgtcttttaagtttgatagaaccaatgatcatatctataagtatatgttgcaccctgaaaattccacttatcctctatatatgataaaacaatcccataattagtatttataccatccatgttaattgttattatctttccaattgccactacatcaagctctacccaaatttttggtaaaaaacctccaaaagtagatgcaagatctgttccagcttttattttctttaatgtctttccacttacataaatatataaatagtttttaccatttttagtaaaagttctgtatttgttatacccatttatatatttcacacgagaattttgatttactttcttagcagaatcgtccacttcttgattgattttatccaattccttttgagtaaattgacctgttttaattaagatctcatcaatcttttcatctgaaaaaattttatcctcaggccagtaattatgtaattcctctacttctttgtcagacaactctattttcacattattatctgattctgttttttccattgcatttgctgtaacagcaagtggtaaagatattatcacagctgccatcactgttgataaaaggagattaattcttttgatattcatttaaatccccctaactataataaatttaaggttttaaaattaaccctttacatatataacatatttaattttgttttttggacacaagttttaaaaaatttatatttttaaaacttatgaaaatataacaaaagatacttgatttgagagaagtgtttttaatattattatatttcaaacttaacgcagttaaggttttgtaattatttatatttgttatttataaaattaattttaatatagttcagtttttaattgacttcatacaaaatagaatataacttatacaataagtgagtctggaaatatttatgtgtattctttgaataaaaatttatttttttagtgataattaaacatttattggtaaggctatggctttaaaaatcatagccttattttgatattttttccatttttgtaaaaattattatccctttaagaaaatttcttaatttttttgaaatatttctttattaatttagagttaaaattctttcttcaaaataaatacttaaatgagctaagatttgagtccaatttctaatcttttgagtccatctttcagaaatatccatagttgctaagtataatgatttgtgcaaagaatcatctgaaggaaaaatagacttcgatttagtaacttttcttaataatctattgtaactttccattgaatttgtagtatatatcaatgttcttatctcttgaggatatttaaagtatgttgctagctcattccaattacttcgccaacttcttaatgctatcgcatattgattaccccatttttcctctaagagcgatagctcacttaatgctacttcctctgtaattgcagcatatactttctttaaatcttttgcaaattcttttctatttttatatgatacataatttaaagtatttctaatttgatgtacaacacatctttgtatttcagtatcaggaaatactgctttaattgcatcagaaaatccaactaatccatctacagaagttattaatatatccttaactcctctgtttttgacatctgtaagcacctttagccaatactttgaactttcattttctccaatccatattcctaagacctccgttataccttctaagttaacacctatggctatatatgcagctttgtttattattctaccttcacttctaactttataatgtatagcacccataaatacaattggataaaccatatcaagagctctgctttgccattcatgagctaaaggtagaactctatcagtaattttagctattagagaatgagatatatcaattccgtaaatactcttaaggtggcttgatatatctcgagtagacataccttttgagtacattccaatcacttggttctctattcctgatatatcattttcataatttctaattacctttggttcaaaatctccatttcgatctcttggaatatttaaagttatttctccaaaatctgatttaacatttttatttctatatctatttctagagtttttagtatttttattcttattgtcatatctatcataacctaaatggtcgtcaagctccgcttctaacatttgatgaattgtacttgcaaataaatcttttagcatatcttgaatatctgtagttgttttaacatcatattcttcaataagtttttttaatatttcgtttttgttaaacataaaaagtgtgcaccttccttatatatagtgatatttaatattttaattatcactactttttagaagaatacacactttattttaaagacccacaaaagagtgcctcataaactaaaaagttaattttgagacactccttttattaaggttctttattttacaatataagtttataaaaattaaactttatttatcaatctgttctctaagccatttagtcgctacatctaactgtttattttcatctttttcttcaatagtaggctttatgcctttttcattgatataatctccattaggtgtaaaatattgagcagtagttaacttgtatcctgttccatccttcaatcttacaactgattgtaccaaccctttaccaaaagttgtagtccctacagaaataccttctttattatcaacgattgcagctgttaatatttcagcagcagaagcactttctccattagttaacactactattggaagtcccaatttttctttatcagatttcaagtactcagtatttcccttattatcttttgtatatactatagttccttcaccaattaactcatcagcaacttctttacatatatctagcattccaccaggattatttctaaggtctattactaatcccttgatattttttgcttttaattcttttaaagctttatcaaagtcagtatatgtacttgatataaattgggtaatttctatatatcctaaatcattatcaattactttactttctatactcttctcaattatctggtctgtttttactttaaagttcaattgtttatcttctcttaatatagtcagttcaactgttttcccttttttacccttcatcatacgaacagcttcatctgaatttttatatgagacagattttccattgacttttactaatttatcccctgattttacacctgctttctctgctggagaatctttcatgggaactactactaagccaccatcttttgatgcccctatatacatacctacaccaacataagaaccttcactatcattaattagattctccatttcatctttagtataataaccagaatacttatcatttgttcctagaaatagaccttttgctgctccatttaccaaatcagtatctgatacttttttataaaaatcttgttttataatagattctagtcctaacaacttatcatattttttatagtcttcatagagttctttcgatattacaactttattccccaatgtcaactgaaatgctgatgtaaccatagctgttataattactaaaatcacccctaaaaaaatagctttcttctttgaaatcacaagatacatctccttttacataaactattattattatatgactagctgttatttttattacatttacccaaatatattgctttattacaataaattatactaaaatttatattaaatacaattgctgtacacattataacatattaagggaggaattattttatgaaaaaagaatttagaaaaaaagttattgaatcaagaaaaaataagagtgcaaactttgtacttagtaattcaaatttaataactgaaaaattacttcaaatggaagatataagaaatgcaactaatataatgctttatctaaattttaacaatgaagttcaaacagataatttaatcaaaaaacttttgtctctaaagaaaatagtatcaagtcccatcacaataaaagaaaatcatacattaatccctactcaaataacagatttaaaagagggattgagaattggagcatatggaataagagaacctaacgaaaaatcacctacaattgatattaaggccttagatgttgtaattgtaccagctgtagcatatgatatacattgctatagattaggatatggtggaggattttatgatagatttttagaaaacttaagaaaagatgctataactattggcatagcatttgacttccagatattcgattctattccaaaagaaactcatgatgcacaattagactacatagttactgaaactagaattatcactccaaataattagaacattaagtatttccagaccccatttaatatagtaataaatactactgttaatatcttactttataagcattttaagtcatggcttttacaacaataagaaccatatacaatttacttacattaataaaaaccatgactttattgtacaatatgcagttatttaattataaaataccttcttatttcgtcgcatttaattctattctatctggaagttcactcatatttgtttcaacaactatgtatggaaaagaatcttccttatctttatactttatcttgactctcaaaacatcctttccttcctcaaccacactttctattttgtccatttctataccatatttattatttcctctagtcactataatgtatattttgttatcgattttagccgctaatgctctttcttcatttgtatacttatccatcacatctaatatcttttctggtattgaatttctttgtaatactgtataatctatgggtttagatttctctacaaacatacttggtatgaatataaatccccctataacgaatacaagagctataactccataaattatacctttaatattaaattttacattcaatcttatcactcctcccatatattctaaatatatgatttataagcttatcttagactctaaattattgattagtatatatttatccataattataaatatatgtaatgtaactaaaaaacatgtttttcctatttcataataaacgagctaaaaaataaaaagagctatatgaaaacattttcattgttttcatatagctcttgagtttacaatattaaaaaatacttatttgtcactgattccttcttgatatccagatgtttttgtaatctgtctataaagaacacaaaccagtattatgacgcccatatatccagtatatggatataaaataccaaccagcttatcaaatggtaggaagccacctataagacctaatatagctgctattaaagttattaatttaaacttaggatgtttatcatctacaaatctattagttactgaccataataaaggtacagctgttgtatatatacctaatataagaattattgagaataaaactccaattactggtgaaatcttatctgctaagaataatgatggtattgcttttgaatataagtttcctatatcagaaagaatagctaagtgcatcattatagctgcagccataagtgctactccacctaatataccaccacaaatagcttcttttttgttagcagcacttgctcctaatccagttaagaatgccataacaacaattgtgttataagtagtatatattacaccagatagataggcatttggaactggtttagctatctttacagtgctaagaacttgtgcagcttctcctatattacctatgtttttagctaaacttataccaccaactaaaagtgtaaagattattattataggccctattccacctagtatctttgataatttatcaagacctagtgaaacagttaataatgctactactgccatacctactctacctacaaatggatttaatccatagtattcagttaaagttgctcctgctcctgaaatcattactacgaaaacaccaaataagaataaaggtccaaaccattcaaagaatatccctaaatacttaccacaataaacacgataaattttgataggttctttaagttgaagctctttaccttttgacataactgaagcacccatccatgagaataataccattgaaattatcccaccaataatacctgcaaaaccataaaaagagaagaattgcattatttcctgtcctgttgcaaatccagaaccgattactgttgctacatacgcacctgcgaaactgatgactgttttaacatttactttttctgacatatctcagttacctccccatgtgaaattttttcttctgattaaataattcgataaactacctacaatttcctttaacataaaatacatgataactgttttatagctttttagtataataacttaaaacttataatctgattttataccctactcctcctctcataatttttttagattcttttatctaagtagtcattatatataaaattagtttctctatagattatatattagtcatatttttctgaatagtcaatatatatttgaatattttctctatttttgtaaaaatttgaatattttattacatttttgatatattgatatcatataaaaaaaagagagatataaattaatataacactttatacctctcttttaaatatattatattattaacaaacatgaataatttatatctcttacattctttttgcaataatagcttctttaacagtctttattatgtcatcacaagttaattcatatttttttaacaattcatttggagtaccagattctccaaatgtatctttaattccaactttctttacaatggttggacaagactctcctactacctcacttacagcagaacctaatcccccaattatgctatgttcttctacagttacaatagcattcgtttcttttgctgattctaatattaaatctttgtctataggttttatcgaggacatgtttataactctagcatttataccttcttcttgcaacttttcttgtgctaatagagcttcatttaccataattccacaagctataattgatacatcctttccttctcttaagactgtaccttttcctatttcaaatttataatcttcatcaaataaaactggtactgaacttctccctaatctaacataaacaggtccattatacttagctatttcaaaaataattttttctgtttcaactccatcagctggaacaagaactgtcatatttggtatagctctcattatagcaatatcttccacactttcatgagatgctccatcctctccaacagtaagacctgcatgagtagcacatatttttacatttagctttggataacaaactgaatttcttataatctcaaaagcccttcccgtagcaaacatagcaaaagtacttgcaaaaggtattttaccagcagttgataatccacaagcagcgcctattaaattttgttcagctatacccatattaaaaaatctatctggaaatgacttgtaaaaatcatgtgtttttgtagactttgataaatctgcatctaatactacaacattgtcatttatttgacctaattttactaatgctttaccatatgcttctctcgtcgccattttactcattgtcagcacctcctaattcaagcaaggctttttctagctcctcatcacttggagctgtcccatgccatcctgcttgattttccataaaagatattcctttgccttttatagtttttgcaactatcattgtaggttttttaactgttgatttagctatatcaagagccgcaaatatttggtcaaaatcatgtccatctatctcaattacattccaaccaaaagctttaaatttatcaactattgaacctaaactcattacgctttctatatctccatctatttgaagtccattattatctaaaaaagcaattaaattatcaagtttataatgtgcagcactcatagcagcttcccaaacaattccttcttgaacctcaccatcaccaagcaaagtatacacattccacggagcattatccaactttgatgccatagccataccacatgctactgaaaaaccttgacctaaagaaccagtagatatttccacacctggcgtgcctttcatgtctggatgaccttgtaacatccttcctatcttccttaatccattcagttcttccttatcaaaatagcctttttcagccaatgtagcatataatgctggtgcagcatgtccttttgataatacaaatctatctctatcctccattttaggatttgaagaatccacattcatttcatcaaagtataacgcagtaagtatttcaactactgataatgaccctcctggatgtccagatttggctctatgtatcattgaaactatatctcttcttatgatacgcgcaatctcatttaatcctttatggtctctcatgcaattacctcccttgagttcgtaattttatatcaattccatattattatatcacttttatgctatttttttgcgttatttttaattttattaacatagtacattaaaattaaaccttaagagatatttaaaagaaaaaagggattgtctaataaaagacaaatccctctttaaaaagtaaacaatcctaaacttatttgaagtccatcatctacttttatcatcatattttcatctagacaaccaattttttccctcagtctctttttatcgatagttctaatttgctctaaaagaattactgagtctttattaagcccatattcattggaacttatctctacatgagtaggtaatttggctttattaatctgagatgttatagctgatactataactgtaggactatatttattacctacatcattttgtattatcagaacaggtctaacgcctccctgctctgaaccaacaactggacttaaatcagcgtaatataaatcaccacgctttatttcacaattagtactcaccttgggcaatcttcccttcatttttatcatcagaagatacttcttcaactgtcatacctaattcagctagtgacagattaatttgacccatttctctataacccgttttcatagattctttaatatgaattttctttttctgagttatatagaactgaaaagcagcttttgcaaaatcttctctgttactgttctccatctgaactatactatcaacttcagaaatcagagagtcaggtaaagtaacttctattttttctttactcttatcgtacacaaaatcgcctcccagattataatatcatggttttattttagcaaataactgtttatttgtacaagctcattattttccatataaacacggtcaactcttcttgatatcatacataacacttcatagtttatagttcctaagtctttagctatacgctcagctgtaacttcgccttctccaaatagtataacctcatctccaacttttatgtctatatctttgtcaattctaaccattatttgatccatacatattctaccaactacatcaaacacttctcccttaataagaacctttggatttttttggattctagtaaatccatctgcgtatcctattggaactgtagctattgtttctttacctgtagttgtgtattttagtccataacttattcctacacctggttcaacttgttttatatgtccgatttttgattttaatttcatggctggtcttaattctaatctatctttaaatacatcatcagatggataatgaccatataatattattcctgctcttaccatatttaatcttaaatcagggcaatccataatagctgcactgtttgatacatgttttatagctatttttacaccagcctcatctaatttatcagacataaatttataattattagcttgtttataagtgtactctttacttacttcatcagctgtagcaaaatgagtaaacataccttctaaatcgatatattctaatttatttaattctattatttcctgtactgactcctcattaggttggaaacctattctagtcatccctgagtctattttaacatgaacacaggctttttctcctaaagattttgcaatttcatttatcttttgtgctgtttctaaagaataaactgtcatagttattttattttttatagaatcttcaaaagcttcgtctggagtatatcccaagttcaaaataggaagtgttatgccattttgtctaagttcaattccttcagcagttcttgctactgctaagtaatctactttttctttttctagcaattttgcaacttctactgcaccatgtccatatgcatcagcttttattactccacaaatcttaatatcttcttctaataaatttttaatattatttaagttaaatcttaagttatctagatttatctctgcccatgtaggcactgttattttttgcatgtctttagtcccccttagtttctgtattcaaaatctttgtattttactgtaaatcttggcactccctctttatctaacacttccattttttcaggattttttgtgtcagcatttacatataatacttgcttgttaaaatatttattatccccaggaataaaagtctctaaaaccaaatgtcctttggataactttactttcatctcctcattttgaagatagttttttataaagtctcctacaaaaagatattgattattttttcctgtattaggtaactccactacatcactaatctttggatttttaactaatattttatcaccttgatattctatacttttcccttttaaatgttttggggaaattacttctaatttatagttatcggtttttttataagtatgaattaaaacataattgtgtgggcttttatttccaactacttctacttcagctttacaactgtaataattcatatcagaaatctgcttttgaaaatctttgtatacttcttcttttgtggactgtcgtttttggcatcctattacaattataaccagtgccaagaacataatacatactatggtccacttttttctcacatcacacctcctacttcagtttattcattgtataaagcttttattatatcatatctacaaattatacctttaagtttgttgtcatcatctactacaggaactctgtttattgattttttaatcattacattagctacatcatcaaacttatcatcttcatgaacctttattatatctttagacataagttctccaaccttataagcagctacttgttttatatctttttcaactttttttaagtcatctaagaaaatcaatccttgtaatagatttatatagagaggtgcttctatatatttttcttttttaagaatatctgtttcagaaattattccaacaactctattctctgaatctacaactggcagacctcctattttttctgcaattagcatattagctacatctgctatactatcatcttgttttgctactattacatctgttgtcattatttcttttgctgttttatccatcataatgtaatcactccttagtccttaattatggttatcgcatttgctatagcataatcttttgaatgtgatattgaaacttttatttctaaaacattataatctatgcacatttttgctagattattataagtttttactattggttttcccatttcatttctgagaacttctatatctttaaaattaaacaatctaattcctgtacctatagatttacttatagcttccttggctgcgaaattacctgctatactttctgctttaaaattcttagaattaaaatactctatttctctatctgtaaatatcttctccaaaaacctattatttttgtctacagcctttcttattctatcaatttcaattatatctacgccaatatcaaatatattcattgttcctccagaaaatttataatacttctttcaataattaataatgaatttataaatttactatcgataatacacattattatttagtttatgttacttatcttaatttaataatcattataataaaactgtaacttttaaaattatttgtaatgaatattatatacaaatctattatattatttattatactacacaactaagcaaattttttaaattttataaaaattttatatgtatttcttatatgaagactttttcacttacataaaagctatctaaatcttctttatcttattaattacaacataatttggcagtaaatttaaacattttgtgaatttattatcactaaaaacttacaattttatcgttattttattaacaccaaaacacaaaaaagccattttacccaaaagtttttttggtcaaaatgactttttatactctaaattaatttattaaatccactcagcagattctgtcaatatgacagttttatcttgagttacattaatgaatccttctgctattttcgcctctttaaaacttccctctttttttatctttaaagttcctacaggtatacctgaaacaaatggtatatgacctttcaacacccctttgtctccttttgtagttctaactactatcatttcaacatctccatcataaaaagtattacttggagttacaactttcaatgaaaattcactggccatgactacatacttcccttcgcttttctaacagcgtcttctattgttcctacaaataagaatgctgactctggtaagtcatcatgtttcccttcaagaatttctttaaatcctcttacagtctctttaacaggaacatattgacctggatttcctgtaaattgctcagcaactgtgaatgattgagataagaatctttgtatctttctagcacgtgcaactattaacttatcttcatcagataattcatccataccaagtatagcaattatatcttgaagttctttatatctttgaagtattgattgtacacctctagctacttcataatgttcttttcctactatactagggtcaagaatccttgatgtagattcaagagggtcaactgctggatatatacccagtgatgatatttgtcttgataaaactgtttttgcatctaagtgagagaatgttgtagctggtgctgggtcagttaagtcatctgctggtacatatactgcttgaacagatgttattgaacctttcttagttgatgttattctctcttgaagtgcacccatttcagtagctaatgttggctgataaccaacagctgatggcatacgtcctagaagtgctgaaacttctgaaccagcttgtgtgaaacggaatatattatcaacgaaaagtaaaacgtcttgtccttgctcatctctaaaatgttctgccattgtaagtccagttaaagcaactctcattctcgctccaggtggttcattcatttgaccaaatactagagctgttttatttataactccagactcactcatttcgccataaaggtcgttaccttctcttgttctttctcctactcctgaaaatacagaaataccaccatgttgcttagcaatattgtttataagctcttgtattagaactgtctttcctactcctgctcctccaaatagacctatttttccaccttttagatatggagctagtaagtcaactaccttaataccagtttctagtatctctgctgtagtttctagttcatcatacgccggtgctggtctatgtataggtaatttaggtgcagattttggagctggtttcccatcaactggttttccaagaacattgaatattctacctaaagtctcatctccaacagggacacttattggccctcctgtatctacaacttccatacctcttacaagtccgtccgttgcactcatagctatacatcttacagtatcatcacctatatgttgagcaacttctgcaactatttctttatctcctaactttattactaacgcatttaataagttaggtaggctttgttcactatcaaacttaacatctagtacagctcctacaatctgtactactttacctacatttgccatttcctaacctccctattttagagcttcaactccaccaactatctctgttatttcttgagttacagctgactgtcttgctctgttataacttaactctaaattagatagcatttcattcgcattgtctgtggctgattccattgcagttcttctagcaccttgctctgatgcaaaagattccaaaattccaccatatactgtacctgatataaactgaggtacaatataacttaaaactgcttctgctgatggtatatattgtacttttgatctattttgtttttcttcttttactgccattccttgttcgtctgtatctttttcaaagactaatggaagcaatttcaaaatttcaacttcttgtgataaagcagatttaaattttgtataagcaatataaacttcatctacttcaccttttttatacaggtcaataatagtttgtgaaatttctgtcgcatcttcatatccacaagcttcaacactatttatatcttttgctatattgtagtttcttttagaaaaaaattcatgtgctttctttccaacagtaatcactgtttcctttttacctttcatatgagagacagattcctttaatacattggaattgtatccacctgcaagtcctctgtctccagctactactacataacatttattttttacttctctttcttttaaaaattcatttctaattccacgtgttgtttgggcaatatcttttactgtattgtataaagtattaaaatattctcttgaatcttcagccttttcttttgcttttctaagcttagaagatgcaactaattccattgctttagttatttgctttgtactttcaacagttcccatacgtgttttgattgctttgattccagctcctgccaattaatttacctccttttttaaaaaggattatacttcaacaacaaacttttctttaaattcatttattgcatctgttaaatcatgagtgaagtcttctccacctaatatttttcttgatatttccggataattattatctacaaatgcatacaattctgattcaaatctagctatattatctatcggaatatcctctaaatgattatttataacagcatatattatcataacttgattttcaacttttattggttgatgctcaccttgttttaatatctcaacgattctttcaccttgagcaagtctctttttagtatcttcatctaagtcagaaccaaactgtgagaatgctgcaagttctctatattgtgaatatgcaagttttaatgttcctgcaacttttttcattgctttaatttgcgcagaaccaccaacccttgatactgatataccagggtcaactgctggtcttacacctgaatagaataactctggttgtaagtatatttgaccatctgttatagatataacatttgttggtatatatgcagaaacgtcaccagcttgagtttctattataggcaaggcagtcattgaacctccacccaattcatcagataacttagctgctctttcaagtaatcttgaatgtaaatagaatacatctccaggatatgcctcacgtcctggtggtcttctaagtaacaatgacatttctctatatgcaacagcttgtttacttaaatcatcatacactataagtacatgtttcccattgtacataaattcttcacccatagctgctccagcatatggtgctatatattgaagtggtgctgattcagatgctgttgctgaaactactattgtataatccaaagctccacctttttctaaagagctaactaattgagctatagtagaacgtttttgtccaattgctacatatatacagataacatcttttcctttttgatttagtatagtgtcaataactatagatgttttaccagtttgtctgtcacctattattaactctctttgacctctaccaattggtatcattgaatctattgatttgattcctgtttgtaatggttcataaacagaccttctatctattataccaggtgcctcagattcaactggtctagtttttgtgtacgctataggtccttttccatctattggctgacctagtgagtttacaactctacctattaaagcttctccaactggaacttcaactattcttccagttctcttaactatatcgccttcttttatttcactgtcatctccaaggataacagctccaactacttcttcttccaagttaagtgccataccatatatttcacctgggaactctagcaactcaccagacatagctttttctaatccatatacactcgctataccatccccaactgttaaaacactacctgtatctgtcaactcaactttattctcataattttttatttgctgtttaattatagaacttatttcttcaggttttaagttcatgggttcaccgccattcttaagatattacttcagatagcttttctttcatcttatcaagacgagttttcacagtgccatctatttgttcatttccaattctaactagaactccccctagtatagtcttgtcaacaacattttctatagtaacatttttgttgtatttatttgaaagtttgacttcaagttctttaatatctgtttcactcattggaatagcacttattgctactccatcaattacattgtttttcttatttaataattctttataagctaattcgatatcttctaaatatgatattctatctttatctactaaaacttttaaaaagttttttatgttagaacttacttccttactaaaaataatttctaccaagtttttcttttctgattttgaaactaatggtgattttaaaactttgtagaaatctttactaactttagtcatcatatctactactttttctagttctttgaataagacatcagttgaattttcttcttctcctaattgaaatagggcttcggcatatctatttgctattacatttatcatttagcttcccctacctcttttataaagttttctatcaattcttcatgtttagatttatctaaatctttttcaataactttagatgctgcaagtagtgctatgttagatatatcatttttgatttcatttataaccttttgtctttcttgttctatatctttgtttgctttttcttttatatcaagagcatctttctttgcagtatttactatatcatctgatttctgctctgctcttatagttgcttgttttatgatttcttgaccttcatccttggcaaaattgatttttgactcatattcttttttcagagctaaaccttcattttttgctttttcgccttctgccaaatcacttttaatatcattttctcttgattcaattatatttaatactggcttgaataaaagctttctcagaagtaaaaatattataaaagtattaacaatttggaacacaaattcccacgttatacctactagtgctttttccataattatcctcctttccataaatcataactacttataatcacgagatgataaagttcatctcatgattataagtttgagatgatttacctataaacctatctcaaaatatttaaggactaaatctacattcctaagtatttaaagaatggatttacgaatagaagtattattgatataaccaaaccatatattgctgaagactctgctatagcaactcctagtaataaagttgatgttatatcacctttagcttctggttggtttcctactgcttctgcagctttagctgctgctataccttgacctatacctgcacctatacctgttgcaactgctatccctgctcctattgctgatgctgccgctactattgctgtttccataattatttcctccttaaaactttaattttttaaattattttatttttatcttaatataagttgatttcttaatctaactctcctgcacttgatataaataccattgttaacattataaatatatatgcttgtaacaatcctgcaaataagtcaaagtacaagtgtaatgggactggtattaatatttctccaattggtattgataatcctggtattaaactagatataaaacctaaaagttgataaaacagacccattattattgttccacctaaaatattcccaaatggacggaaacttaatgatattggtctagctaactcacctataatattgattggtaacattatggcaagtggttgagccaattctttaaagtatgataaccccttaaatttaactcctgcaaaataaatcataaaaaatgtaatcattgcccatgcagcagttgtgtctaagtcggttgttggtgaccttaatccaagtaatgggcttaaatttgaacatgcgaaaaataaaaacaagcttcctatgtatggtatcatatatggcattctttttactgtatttttacccataacatctgtaaccattttagcaagaccacctactgcaaattctaagaatatttgaactttactagttggaactttttttaagtttctagtcaaaaaataagatgctatcgctaaaaaggccattattccccaacttactagtattgtttcactaatcttaaagtttcctatgagataataatgcgcttgattcatacttatgcctccttcctctttaatttatttataaagttttttgataatatgacaaactttgtgctcaataatcccaatgctgttccgattatatttaaatgtggtactgtagctgatgcaattagaacaactgccattataaataatctaatagcatattgtgctgatgcataagcttgtgccttcccagcaggaaatgtcactgatttttccagtgatatcgccaataatctaaaatttaacatagctattatagagccaaatataagtcctaataatactggtttacttaatgttgatgttatcaacattagcacaattaaaactacatcaaatattactataccttttgttactgaccttacctggttaagtaattttatatccaatatatcacttccttcgtgtatatactattagagttttataaacaccactaaaagcacctccaacacccaacaataaaaatattattgtcagaactggagtagtattcaatttactatctaaaaattttcctaagaaagtacatcctaatattgatattacaatcatcaatcctatttgacttattaaactaaacaactttgcaatttctgtatgtgtatttcttttactcataaatagtatccctcattattataaaataaataacatgtaattaatctatctcataaatttatttaattataaaatatatcttactactaatctgatgatttttcaaatactttcttttaatcatttgataccattgtatttcagtgtcataatttgacatttattgtcatataaattttatccactaaaattttatgagttctattcctgcttcttttaataattctgtagacatatcatctggataatcaccttcataaacaattttcaatatacctgcatttatgcacatttttgcacacaaaacacaaggtcttgtagtaacatacaaagttgccccatctacactaataccattatgagcagcttgtattatcgcattttgttcagcatgtaatgctctgcataattcatgcctttctcctgagggaatatttaattcctgcctcttacatccaatattttcacagtgttcaagatttctcggagaaccattatatccagttgttaatatttgtttgtctcttacaattacagctcctacttgtcttctaatacaagttgaacgctttttcactacttctgcaatttccatgaagtattcatcccatgatggtctcataatttacttttctcctctttgcttatgtactggtattatatatttattagatttcaacctaaataaatacttatttttatattatatacacatgttaattgaatgtccaataaaaaaagagcatttttaccatttaaattttaaatacccgtcatatgctctctttaatctattaaatttattatatcatcttaataaaatattaatagctttatctaatataaattaattttggggataaatcccattgtttagtatggcttctaaaacccctccagctatacatctagctttatctgatattgtaaaagcattcttaacttcttcttttctagggtctatgtctagtatttttaaatttttgttcacctttgctccatcctttaataaacctctaaggactccagatattgttgctctaacttcatgttttttttcataattattaatataacaaagtaggtctcccttttcaactatatcacctatcttacatacattttccattataccatcatactgtgaatgcataactctctctttagaaaaaccttttattgctcctggtactcctgtatttttttctgctctaccattagttattattcttcctagattatgacctctcattgtctctataacaacatctacatcttctcctgcacaaaatccaggacctaaagctattgtaagtggtgccatatctttagttgtacctaagtttttcttagcgagtattccatcaaccaaaacgattggatttaacttagataatttttctccttttgggtctataatcaaggctactttatgttgagataaaacttcttctatttctttttcagtattgcaaaatatacattctacaccttcaacagttacttttttttcataaacagcctcacaaaaagaaatttgccttcttatagctaatggctcttctatttctaacgcaactactttaaaaccactgttgtgtaatttatgaataactgctgttgctaaatctccagcccctcttactgctatacaattcttcatgtattaccactcccaataatattattaatattcaattctcaatttaactaatacacttaatacctataatcttaatcgtaagcaactaacatgccacattaaaatagactactattctataaaaccttgtaaaataagcaatcttttttaattggtaaaaactttttattctcaattcgagaaatttatcaattcataattcctattttgagaaaaaatatataaaaaagaaccttcttacataaaattatatacactatataagaaagtccctaataaatatttatagttatttatttttatttagttccaaacaatctatctccagcatcaccaagaccaggaattatatatccatgttcatttaatctttcgtcaactgatgcaacatatatatcaacatcatcatgatatttttgcacttctgctataccttctggtgcagctactaaattagctaattttatacttttagctcctttagacttaagtaaatctatagctgctacagcagaaccccctgttgcaagcatagggtcaactactattatatctctttctcctatgtcttgaggaagcttgcaataatattcaactggttttaatgtttctgggtctctatatagtcctacatgtccaacttttgctgctggcattaagcttactaatccatctaccattccaagacctgctcttaaaattggaattattgctaattttttacctgcaactactttagatgatgttttttgaataggagtttctatttctacatcttttaatggtatatcttttgttatttcataccccattaacattgcaatttcagttaaaagctctctaaagtctttagaaccagtatttttatctctcattaaagttaatttatgttgtattaatggatggtttgtctctaccactttgctcattttgataattcctcctgataaaactgtaatttttattatttattatgtttttcttctattgatttaatcatgtttactcttctagcatgtctatcaccttcaaaatccgtattaatccatgcttcaactatctcaagtgctagaccttttcctaaaactctttcgcctaatgataacatatttgcatcattatgtgcttttgacatttttgcagaaaatacatctgatacaactgcacatcttatcccaggaaccttattagcagctaaagatattcctatccctgtaccacaacataatattccataatctacttctttatttataactgaatttgcaactatttctccataaacaggataatcaacagaatctgtagcattattagttccataatctacacattctatacctttactttctaaatagcttattatttctttttttaaattatatcctccatggtcacagcctaatcctatcttcatttgtttatcctccgtttcatattttttttactatttcgttgacagaatacattatttctctcatagtgcttctataaatatccaaatttccaccaaatgggtcagatatatcttcctcatttttatttgcaaaccctttaaaagtatacactttttctttgcattttggaactgcttgtactaaaatttctttatgagatttagtcattgttagtattatatctgattcatcaattaattttttagtaattactttacttctatgatttgataagtctataccgatttcttttagtacttctatagaattttcagaagcacccattccatttgctgtagatatacctgctgatgatatcgaatattcttcaatacttcttccagattctttaattgctttccttagtatagcctcagccatagggcttctacaagtattacctgtacacacaataagtatattcatattttacaactccctcttaagcctttatcactttgtatcctgctgacttcagtagtctattcataattgcttgtccaactccagtcttagggaactcttctgaatatatgacatcaacgccctttttgtccatttctataagagcatcaaacagattacttgcaacttcttcaagagagtttcctaaatcgattacttctccatcataaaactctcggtttctactgatacacattacacctgtctttagacctttgtctctattagattttatcatatcattaatctttgttgctacattttctctttttccagatattatatatacatctgcatttggagaataatgtttatatttcattccaggagctttagctttttgattatcttcttttttacttaatgatgggtcaagctttacttctccaagaagttcctctaaaacttctttagttatacttcctggtctcagtatcataggagtctcttctgttaaatccaatacagttgactccaatccaaaattactgtctcctcctaaaactattccatccactcttccattcatctcttcatatacatgttttgcttttgttggagatgggcgacctgagatatttgcagaaggagctgcaataggtataccagcttcttttattattgccctggcaataacattagaaggcatccttattgcaactgtatcaagccctccactagttttgtatggaattatatcttttttatttaatataattgttataggtcctggccaaagcttttctataacaagtttagctttatcacttatatctttggctaagtcatatacttcttctttttcatatatatggactatcaatggattgtcactaggtcttcctttagcttcataaatcttctttactgcattttcatctaatgcatttgcacccaacccatatactgtctcagttggaaaaataactgttttaccttctctaagaagttttgcttgtatttttatttcctcataatcaatattatttatatcaatattacttataatagttttcatcttttgtatgcctgctttcattttaattttatatataatttacaatcattgtacctaacaagaaaccaattatacaatacacactttttgaatgtggaaaaatttcttccaatacaacatacatcatagtacctcctgctgtagcaagaaatactcctataagagaagtaaatactcctccaaaataaacacctaaaaaacttcctagacccataggtaatccagctattacagtaaacaaaataactttacttagtttcattttattgcaaactaagcctaatgccatagctaacccttctggtatattatgtagacctataactatagcaagtgtaatacctaaactttcagttgacataaaagaagaaccaatggctagtccttctggtaaattatgtagtaatatacttatgaatataagatatccagatgccatatttccagacacatctaattttgtttttatgtacatagttatgagagctccaacaaacgtaaatataactgtattgattatccccattttgtccatggattctttcattaaatcaaacaccactacagccaacattattccaccagataatcccataaaaaaacttagatatttatcgacctctcttttaaaaatggctgatattactcctcctaatcctgtccctataacacctgccaaaagcccaattattgttacttttagtatcatataaccctcctatacttgtatataacaattatatacaatagaatatgataacatgacctaaaatgcaaaatagctgtttcaaaatagaaaataatttctaggaagaaacagcttctttaaaacattacttatattgcagtcattttttctgtttggtcaacagtaattaaagcatctatcatttcatctatatctccatctaaaaatgcatctaacttatataaagttaaatttattctatggtcacttattctaccttgagggaaattatatgttcttattctttctgacctgtctcctgttccgacttggctttttctttctgctgctatatctttgtgttgttctgccaatgctttatcgtaaagtctagcttttaatatttttaaagcttgctctttattttttaattgtgattttccatcttgacaagatactacttcacctgtaggtatatgtgttaccctaacagcagagtcagtagtattgacactttgtcctccattacccgaagaacggaaaacatctattcttaaatcatttggatttatttcaacctctacatcttcaacttctggtaatactgcaacagtagaagttgatgtgtgtattcttccaccagattcagttgatggtattctttgaactctatgaactccagattcatactttaatcttgaataagcacctttaccttttatcataaaagatacttctttatatccaccaactccagtatcacttgcactcaataattctattttccatcttcttctttcagcataccttgagtacattctaaataaatcacccgcaaatagagctgcttcatctcctccagctccacctctaatttcaactataacgttcttatcatcattagggtctttaggcaataatagtatttttatttcttcctccagaggtgctactttttcttccatctcagctaactccattttagctaattctcttaattcttcatctgactcttcttgtaaaatttcttttgattcttttatactatctaaaacgcttttatactctctgtatttcataacaataggttccaagtcagcatgttcttttatatatttctgccaaactttttgatcatttattacatccggatcacctattttttcacttaagtctttatatgtatcttccaatacctctaatttttttaacatactttcacctcgattaaatgtaacatatcaattgttgattatatcatatattgtaacctataacaactctatcaatgccttgaatatccttctttgtgtatatttttttatatccattacttttcataatatttattacatcttcagcttgattatgaccaacttcatatgctaatattccacacttatttaaatatttcttaccttgttctgttattcttctataaaagtctaatccatcttctccaccttcaagagcattatatggttcataatctttaacttgtttgtgcagagtttctatatcttgttttttaatatatggtggatttgaaactatgatatcgaattttatgttactatcacttattgctgtaaataaatcagaattaatatactttattttttcaccaacttcatttataatagcattttttttagctatttctaatgctgtctctgatatatcaaaagacatgattttagaattttcaatgtactttgctaaacttattgtaatagctccagaaccagttcctatatctaatatacttacatcttttttttctctacatatttcaattatttcttctactaaagtttctgtatctggtcttggaatcaatacgccttccttaacaaaaaaatctaatcccataaactccctattttcaactatatatgctattggtcttccatttaatctttcttctgcaaaacccataaattttgttttttgttcttcagttagctctttattcagatttaagtgaatatataatctatcaacacccaatgttttttgtaacaataactctgtatctaatcttggagtatcacttatatcttttagtttatctgaatatttaataattatatcttttatcgtcataacaaatatccttttctctaatctactactgctttcaatgcttccaaagcaacctctaattgctcatcatcaggctcttttgttgtaaaatattgcaacatcattcctggatatgcaataattttagtaaatccattatcatatttcccaagaactctaattacctcataagataaacctgctactataggcacacatataattctcataaatattctaagaattggatttggccaaccaaaaaatgcaaacaatattattgatacagccataactataaataggaaatttgtaccacatctaggatgtaatcttttaaattttctagcattctctactgtaagttctaaatcattttcatagcaatatatagatttatgttctgctccatgatattgaaagactctttctatatccttacttcgtgaaatcaatactatatatgcaaataatatagctatccttatgattccttctattaaattaagcataaaatcattaggcattactttagaaaaagctcctcctaccaatgtaggtataaaaatgaataatccagcagaaagtaacattgctatgaccaatgaaaatattataattatatcatttgccttatctttaaaaattttctttataaataaatcaaatttatcctcttcagcttcttccataaaaaactctgaagaaaagtttaaactttttatcccttgaatcattgtatctatcataacaaaagaacctctaacaaaaggtatcttatctatattcttatctcttacccaactttttattctatcttcttttagtgctatttctccgtcactttttctaacagctaccgctcttttgtcttttgactgcatcattacaccttcaataacagcttgcccacctacagcttgttttgccatccactcacctcattttattgtatttagaatactcaattttacatatttattattataatacaaaaagacaatttaaagtagaatatgaatgtttttttgtaataaaataggagttggcttcctccaactccacttttataaaaattagtccattttgaatcttttcttgaatttgtcgattcttccacctttttctatgttcttttgttttcctgtatagaatggatggcactctgaacatatttcaacttttatttcgtccttagttgaaccagcaacaaatgtgttcccacaagcacaacgcacttcaactggattgtattttggttgtatttccttttgcattatagtcacctcttctctttatttaaaaaaattaattatattaactttctttttacattatcaactacattattatagcacaacttattatgccattcaagtgatttttctattagtttatataatccatatttgcatttgtattattgattttacaaattctttattgattttacaaactctttattgtccttagttctctttataagttcaatgactttatctgtaatttccattactgaattattactcatttctcttcttaatctccaaagagcagtcttttcttcatcatcaagcaataaatcatctcttcttgtaccagacttgtaaatatctattgcagggaatattcttttttctgctaattttctatctaaatgtagctccatatttcctgtacctttaaattcctcaaatattacatcatccatcctagaaccagtttcaaccaatgctgttcctaatattgtcaaagaaccaccctgtctaatattccttgctgcaccaaagaactttttaggtccatgaagtgcaccagggtcaatacctccagataaagttctacctgtaggagatattgtaaggttatatgcccttgccaatctagttatactatctagtaaaattactacatctttaccatgttcaactaatctttgagctctatttaacaccatctctgcaaccttgacatgatgacttgatacttggtcaaaagttgaatatataacgtctccttcaatagattctttcatatcagtaacttcctctggtctttcatctataaggagtactataagttcaacatttggatgatttttagctatgctatttgcaacgctttttaaaagaactgttttcccagcctttggaggtgctactatcaatcctctttgtccctttcctataggtgaaattaaatctataattcttgtagctatttcatttctattagtttccagtgtaagtcgttcttctggaaatattggtgttaatgtctcaaacgcatttctttgtatagctgtgtcagggttttcatcatttattttttgaacatataaaagtgctctaaatttctctccactttttggatgtctagttattcccttaatcttgtctcctgttttcatattaaatcttcttatttgagatggtgaaacataaacatctccttcagtagacaaataatttgaacctcttaaaaaaccaaatccatctggcagaatttcaagtacacctactacttcatcctcttttgatgtgttaaattcatctactatcttagattcatcaacttgtttaggcatataatagtttttattattatttctgaccattctattagatatatttgatgacttattactatcatttacactcgttgtcttattatagtcatttctttgatttctattttcttggttttgggaaatattttgggtatctatttctttcttgttgtatgatttggtagggctcttatattcaacttctttttctatactttcacgctctatattttcttttctattctttatgtcttctttaatatcttcatttttttctttagtctcttcgtttactttttcctcatttttacttttggaatttataatctcaattaactcatttttcttatatgtagtaattgattttatttttaattctttagctatctctcgtagctcaactaaggtcttactacctaatccttctaatactttatcatctaaaatcaaaaaaatcctcctcatctatatattcatttatatacatacttattttggaaattgaaggcatgaaaaagaaaagttttatttaaacagttaagtctaataatatcattatttatatattatggtcaataaataaaatttaaaacattattacctactatattactgtatttcaagtccaatcttagcacgtttttataaatttatcactatatttatatcttataataatattttcctttaaaatatgcaactattataaaaatttttttttacatttataaattctaaaaaccatatataactaaaatattgtaagtttttgactacatcaagttatatatggtttttatatttatgtatatcaactgctgtcatttatcttattacatagttgcaatcatactcaaaacagctgttatactcgttattacgaggattcccacaatcccaacagctattattctattaattcttttctgacttgattttgccaccatacatcacctttcattaattatttttgaatttcaagttctctagcttcattgacttcaattaaatctattttttcatctgtattattgtataacacattgttatttttatcaaattcactacatacatgtttcaaatattttataaaatcttccttaaggtcttctttctttagagcaaagtcaacagtagcttctaaaaatcctagcttgtccccaacatcatatctcttgccttcaaaattgtatgcatacatagcttctttcttagataatatttttaaagcatctgtaagttgtacctctccacctttacctggtggtaaatccttaagaatatcaaagatttcaggagttattatatatctacctaaaatagcaatatttgaaggagcttttcctgactctggcttttctaccatgtcttttaccttgtaaactctaccttctatattttttgcttctattatcccatatttattagtatcttcttgatttaccttttgaacacccaatattgtagttctatattcctcatatgcatctgttagttgttttagacaaggtacatcattatctacaatatcatcccctaacattactgcaaacggctcatcacctataaaatgcctcgcacaataaattgcatctcccaatccttttggctctttttgtcttatataatgtatgttaatcatgttagatatgttttgtactacctccaacaattctttcttaccttttttctctaaatcaagttccaattctacagatttatcaaagtggtcttcaatagattttttatttctacctgttattattagtatttcctctattcctgaggccacagcttcttctattatgtattgtagagttggcttatcaactattggtaacatctcttttggttgtgcctttgtagctggcaaaaatctagttcctaaacctgctgctggtattacagcctttttaactttaacttgcatagaatcatctcccactaattaataaataaaaagtcctatcttgataggactttaaacttttagtatattttatcattaattcgatatatttaccatgtggattacaataatgtttataatagcttttcaagttctgctactaaactatcaaattttttgattgtattttctatgggttttgtattagttaaatttatgccacttgattttaacaagtttattggataatctgaacttccctttttaagaaagctcatatagttatctgaaccattctttaggatgtcttgggcaaaacttactcctgcactacaacctgtagcatatttatagacatagaaactattataaaaatgtgggattctagcccatccgaccttagataattggtctaattcatagctttgtccataatattttttaagaagttgtccccaaacatcatttaatactaatgcgtttacactttttcctttttctactaactcgtgtatagttttttcaaattcagcatacatagtttgtgtataaagagtatcttttatcaagtctaaatactgtgttatataataagctttttcatcattgcctttagcttcttttataagcatctcgtaaagtaatgcttcattcgttgtagatgcaacttcgtgagtaaatatagacggatttgaattaaaataattctgattcttagaacttaagtattcatatacagcatgtccaagctcatgtgataaagtcgaaactgaacctaatgaattattataatttaaaagtatatatggatgattttcataaacagataagcagtatccaccacttactttattttcatgtgaataaacatctatccatttttcattgaaagctttatatactacatcattgtattcttttcctaaaggtgacaacgctgaatatactatactttgtgccttttcataattaatattattatcaacagccttaaccataggcacaaacatatcatatgaatgaaccttatctaattttaatactttttttcttaaatctatatatttgtgtagactgtccatattactatttacagtccttatcaaattattgtatactttttcatctacattatcagattccaagtacatttctaaagaagactcataacctctttcctgagaataaaaaatattctttttaacttgaccagtaattaaacctgcaattgtatttatattatcattgtaagttataagttcatcttgataagctttttttctattttctctatctactgactctaattcacttgcatattgcgctggtgtcaaattagtttttctatccatatttctaaataattcatatacttggcttggaagactacttattgaagatactttgcttagaatatcttctgatttatcatccaaataatgtactttattccttcttatatctcttaaatatgcaccatatttcctatttatatttttatttgaaataattttcttgtaatctttgtttgataattttagtatttctaattctaaatctgaacaaatccccatataattcccatatgatttactcatactatcactcatatctaagtacttatatgaatttttattagtatcttgttttaattttacataggcagaaagtttatttagtcttatatcaagtttttccttaatgtttaaggcaaaagacaaatgtgttggcgattttgttactttacctatgtaatttttcaactctttagtatctttatcaaaactcttaagttcttttttccattggtcatcacttttgaacaaagattgcaaattccaacatgttttttcatagtctacttcttgttttttttcagcatcatcttcagtatcattattattcatgacagcaattgctctgtcattattcttttgatatccttggtcagcttttatacttattattaacatgcaaaaaatagaaataaataaaggtattattgctttgcacaattttctattcataaaaagccatcctttcaataaatttacttaataataggatggctttttttagatatattattcaattattcatactatataaataaatatcgaattaatagttatccacataataatcaacatattcacaggttttctttacttagaaatttagttatttcaacatgaatctcttttgataatagcttttgttttttctttttttacattttattaacatttctgccatacttatcaacaaattttgttgatttatatgttatttttgttaataactatacttttttcaaaagtctattaacatattatacacaagttatccacatcttatacacataatcttgtaaaccttattttgtacatattttcgtaactaaaacagtcatgtcatcttcgatttgtaacgcttgtaactctaatgctctatccaatattaaatttgaaatttcctttggatttgtagtctctatattctttaagaagtatattaaccaattgtctcctaaattgttatttcttcctgcatctacaattccatcagaaaccattataacatagtctccttccttaacttttacattttttctatcaatttttacatctgataatatacccacaggtaatgatgatgatgatattaagtcaacttctccatcctctctttttatataagtagaacacgctcccatctttatagtttctaaacaacctcgttttaaatctaaaattcccaaatccagagttgaaaacatctcttctgaagattttaacaacaacatattatttatagtatcaatgactatctcatctttaatttttgcatctatcattttttccagtatatcaatagtggcagaagattcttcatatgcttttttaccctttcccataccatcacttatagccatcatgtatttaccatcatttatctccatgtatgtgtaattgtctccacaaaggatatgcccatcccttgacattgctgaaacttctgtaacagccttatatttttgagatttaacgaatgttgccttgcatttacctcctaaacagtgacatcctatttttctaacagacatattttcacctactaggtctgaaattatatttacaattttatcttcacacatacatccatcatgacaagttttcttttctattgatatttcaaactcattgttactttttgttaagtaacttactttatcaactgttatatcatatctttctaactgttcatatatatttttttccttttctatatctagcattatgtcaccttctaaatcttgagataaggatttaatggattttgaaatacttcttatctgatttgctattaactttctactttctgaaaacttcacactccaatcataatctaatacaaacattttgtaatagtgatttgatattttcactatcgactctggtttcatacattcctttctaaaatttttaggtatatcgtttagacttaactcccctttctcctcaattttttcaagaatgttatatatcatagtgtatgtatgattaaatcttgactcccagcacattcttctcatactacaacttttacattcatcattatgaatcatatctattacattagctatatctctttggtctagcactttgtctttttctcttatcttatcaaatgtatctgcaaggtcatcataagttttataaatactgttcaatctgctattagttaggtttttgcttctcataatataatcgtatacgatttcatttgaagccacattactttttattaatttttcaatcttattaaataatctctctggcaatactagtactatcaaacaacctaatagtatatctcttaattgcatcatattagaagtaataccagaagtatataggtatattattgtccaacttagaatatatcctagtatacagaaatatttatttattttattaaatgctccacttattaatcctgaaaaagaatatatccccatataaacagctgatgtcatattatttaaaatggatgctacaccaataattacaccactagatgctcccatggtagctccacctactattgaggtcagcaatatcaatacggtcgataaaatggtccttattgatattccaaacagagatatatctcctattcccattatgctaaaggttagcagtaaacttattgatatagcttcttctgtccgtacagacatcctattgttgacattggccattaaacctatcccataagaaaacacatatatagatataaacattattattgcttctactcctgctataagaagaccatatacatacctatttgaaaagaaagcttgtcccatggagattggaagtagtattattgcacctataaatgcaaccttagcaattgaatctgataattttaattttttattcatagccataaatattgtaaggcacacagcatattttgctacatttccaaaatcattagatgataacaatattcctaataatgttgatatgaatacaggtatcttgtacttatcaatctttgatgcacatataaaaaaggcaattcctaaaggagctacagagtctactataatagacctactaagtaaaaatcccatcacagcgaatgccgccgtagtaaaatcaatatatccgcttattaattttatgacatttggttttacagtcttattcttcacaactgctacacttctttgcataaaaaaacctcctcttttgtttatattaagaattgtaacaaagaggagtaattttttttgtcataatcggttttaaaaatcaaaaaatattaatacattttttttgacttttgacatattaagccttccaaattatcgtattcacttacggttatttcttctatttctaatttttccattattatattcaatatttttacaccagcagttataatatccgcacgtttttcttgtagcccttttaagttctttttatcacttaatgtcatctttattaatttttgtagaatttcttctatttcttttttgtgtattttactattatgtattttttccatagagtaaatctctaattcttgattcattgctgataatgatgtaatcgtacctcctatacctataagagtttttaatcctctgtcttttatatgatttaacgttttgtcaatctcatcatatataaatgaactcatagcttcaaactcttcatcttcaataatatcgtgcttcaaaaacctctctgtcatcctaagagcacctacattctcacttttattaaatttaattccttctgaatcacctacaataaattctgttgaacctcctccaatatctataacaataatagtatcatcaccttgtattccttctaaaacacccttaaagcccaaatttgattcttctattcccgtaactatatcaacatctattccagtttcttctttagctaatttaacaaagtaatctccatttttactgtctctaagagcagatgtccccatacaataaattttttcacacttttcatcattacacttatcagaaaattcttttaatgcttttatatttcttttgatagcatcttcttttatatatcctttactatccacaccataaccgattctagttgtattaacaaatttttttctgtttataaaattcccatctctataatctgctatcagtaatctcattgagtttgtcccaatatctatagctcctactttcattatgaaattccctcctcaataaaaacaaaaagccatccttaactgaatgacttttttattaaatcttaaattttaaaatcaatacatctgtaaacttattagcaagttttaatcaacgatttatgtctacataaactgtttcatttggttttaccatattcaatctttttcttgctatatcctctaagtctccttcatatgatttttcatctttctttaagctgtttatttgtatttcagtcttttttaattgtttatttagacttgctatttcttttttatattccttagcttttgtatactcaaatacaaatcctgtcatcatactaaaaattgatattcctaaaaataaactgataacaataatctgtcctgaaaatttttttcttaagttcatttttcctacaccctttttttagttttattttttttcttcttaggttttgattttttcttgttctttaattttttatttgattttctttttatactttttcttgttgctataaatatgtttggtatataaaatataatatcaaatagtaggtgtagtgaatagattataacgtaatacaaattatttaaaaaactgactatgtaatgtgtaacttttttaaaagaatttctcacaaaacgaattattttattgataattgataaaacaattttacttatggtgttatagtataaaataaaaccaataaacaaagccacaaaatgataatatcttaaatcaaaaaattctgtaaggtttattgttacgaatattataaccgtagctagaaaccaaaacaatacatcaaagattatagcaaaataattgatgaatttaaaattccctcttagccctctataaaaatcaaacaacacccctatgagtattccaccataaatagtagcataaaaaatgcttacatcttgagtaaaaggtatcatctatctaaatacctttttcaagaaactctcttgtggctttttaggctttgcatataccatagaatttatagttccatctatgctaattatattttcgtctatacttagcttgctcatatctaggttttcgccttcaattaccatctcgcctacagaagttttgagctctactcttttgtcattaaaagagtatatgtgctcgactcccgaaataaccagctttgatctatctttcaaagttatgttctgttccataatatccccccagtaaatatttcaataatactactattaatatactagaggactattaattttattctaaaatttcgtacatttcttttgcatcattttttaatacatgctcttttacttcatttatcttaaacttcatcttcttctctccaaattgtatttctaatgtatctccaatattcacctctgaagaagatttagcaacttttccatttatagtgacaatccctttatcacatgcatctttagcaacagttcttctttttataatcctagatacttttaaaaatttatctaatctcataattatcaccttccttggttctatagaaaaagtgtggcaaatttatccacactttttcacaagatttctaattatccatttattatatcctttaatccttttccagctttgaaaactggtgctttagaagctggtatatctataacttgctctggatctcttggatttcttccttgtctagcagctctttctcttgtctcaaatgttccaaatccaactaattgaactttttcattatttactagtgcatcttgaacagaactcataaatgcgtttaacgcagcttctgcttccttctttgttaatccacttttttctgccatctttgatactaattcagctttattcacgatatttacctcctaaaaatgtttataatatagacttctatctttgtgataaaagttctagatttttgacaaatttccttccacaattttattgttttttagcctgattccaaaactcatccatctcttcaagtgtcatgtcttctaattttttattcaagttcattgcacttttttctataaagtcaaatctatttatgaatttttctgtagtacagttcaaggcttctcctgagtctatgtctaaaaatctagctagatttactatcgaaaataataaatcgcctagctcttcctttatgtattttatattcccgaccctgtgttcgtcaagtaattcctgatattcttcttcaatttttttaaatacatcttctacattgtcccaatcaaagccgacaagtgctgctttatgttgaactttactagccttcataagagctggtaaatgttttggtatccttctaaggccatctgttatagtactttcgcctttctcttctttctttaattcttcccaagttttctcaaacttagacatatctaattttgcaccactaaatatatgaggatgtctatgaattaattttttacatatgccatttactacttcttttaaatcaaagtagccctcctcatttcctatctgacaatggaatataacctgtaaaagaacatcacctaactcttctaccatttcatctatatcattattatcaattgcattacaaagttcatatgcttcctctataacagaattttttaatgattgatgtgtttgttttttatcccattcacatccagatggacttctaagtgtattaactattatttctaagtcatgtactgtattatacatctttttagaacttttgggtatatataagctagttaaatagtcaaaaaagttttcatttctgtctaattcacaaagctttataaactttttactttctaaatctttgacacctgctccatttactatacatacttcttgattatagtcataatgttccataagttttaactttacattagatgctataaatttatcatatacctgagttattatcatgcttgtatccaagtctatatatgaattttctatttcaaaagcatctaccagtttaaatccctcagatgggtctatagccaaatagttaaacatagcgtctacaaagctcatagaaggcaatatttctactgctatgtgcttttcattggctaatctctctattatacttacagtcttctctgcaactcttggatgaccaggaacagcatacactaggtcaccctttgctgattcttctatgataaattcagatattttcaaataaacattatcaaaattttcctctttttcataaaagtagtctaaagaagtgtattgtatagtttctttaagtttatcaattattggatgtttctctgttctaaaaaaaactttagggctatttattaaagattctaacacaccttggcttataagagaatagtctcctggtccaagacctacaatacttatcttacccataacatcactcctattagcaaatttcactttatttttatattattatacaaataaggagatttactatttgtatagtatttcctttatttgcatatatattcctatattatcttataagtttaactttttttaacaatttatataatttatcaccttttggcatagttagaatctcttcttttttaattccacctattccaagtattactactacatatacaattccaccaacacatattgcaattattgtagatatgctgtttcctaagaatccaactaaagcaccataactcaacttaaccattataaacattgtcataactgttataaatggctttattataaattcttttttagaaaagtttacattcatgtgttttttaacatatagtaagttaatcatggctgccacaaagtatgctgtaactgtaccaaatgctgaacccagtacattaatatctggtatacctgttaaagtataacttattacaattttacatagcataccaacacataaagcaattacaggtactattggttttcccattccctgaattataccagtcaatgtctgtattaatcctaaaaataatacacatggagtaagagtaaacaaaatagttcctacagaagatggttcatgtggaaataaaagacccattattggtattgctaaagaagccataccaaacgcacaaggcaatactataagtaaagttaccttaactgcactcttagtatcttttctagcttttgacttatttcctaatgcatatgctttagaaattgctggaactaagctcatactcattgcagttgttatgactgctggtaaatttattgtggccattgccatacctgttaattgaccaaacattgaatttgccactttgtatgtaaatcctgcttccataagtcttcttattacaataacattatctatcatatttacaagtggcattactgatgctcctattgttataggaatggcaacagttaaaagctttttaaaaatataagacactctttcatctttaaatctttggcttgcatctatctctgctctacgctcttttctccctagcatataagcaaacaccaaataaagcatagatgctattgaacctattgtagcccctgatatagcacctgctgcaccaaaagtctgacctagactcttcataagcaagtaggccaaagtaagacctaatacaactctaaaaaattgctctgcaacttgagacacagcaatcttagtcatatcttgtctcccttgaaaatatcctctatatgcagacattgcaggaacaaatagtaatgctggagcaatggctttcatagagtataacgcacctggatttttcattacgtttgttactatgtagtcggctccaaaaaataatatacaaaatgatattataccggtaatgaataaaactgtatgtgataccttaaatatcttatttgcacctttaaaatttccaattgcaactttttccgaaaccaattttgccacagctgttggaaatccagcagtagctaatgttaaaaatagagtatacacaggataagcagcctgatagtatcccattccttctgaaccaatcatgtttccaaggggaatcctaaaaaatccacccattatttttacgattacacctgctagcccaagtataagggctccttttagaaaggagtctttatttttgttattgttcataacataacctccatactgtttatataacaaactttaatataccatatttttaatgctatattcaatattttacacaaaaacttcaaaagaccttcatgtaaaaggtctttatgataaaattattgaacttgttttcctaaaaagttagcagcaatttttaaagatttttcttcactttctgcaattgtatctttatcctttgaaacaactacaattgaacctatacagtcaccagatgcactaattataggcatgataacttgactagtatattctttttggtcttccttgaataatggtaaaatgtttttatcttttgaatattttactgttctttcacttattattgcttctaactcatcacttatacttttttctttataatcttttttaggaagcttagacacagctattatagaatctaagtctgttatcaacactccatatcctagtacttcagctaatgtttcagcatattcttgcgaaaattcatttaattcacctattggagagtattttttaagtatgacttctccatcttttgctgtgaatatctctaaagggtctccttctctaattcttaatgtctttcttatctcttttgggataactacccttccaagatcatctattcttctaactatacctgttgctttcatattttttaatccctccataaattactttaagtttatttttaccattgttaagaaaaatatacaaaaaaagctatatcttatccagatatagcttttttaagcatattactctttttttaagtcttagattgtgattttatttattactttttcatctttttctaccttagcttctttagttaatttttctatttgttcttgatatttatttttcaacagttggtcttttatagtttctttagcatcttcaaatgatgtttgctcatttattctgtctgtcactttaattatgtggtatccatattgagtttcaactaaatcagatacttcaccctttttcatagaaaaagcagcatcttcaaattcagcaaccatttgcccccttgaaaagaatcctaatttaccaccatcacttgctgaagtatcttgtgaatatttttttgctacttttgcaaaatcctcacctgatttaacttctttaagagcctcttcagcctttttcttagcttcagctttttccttatctgaaagtggcttgttattatcatctactgttttcaataaaatatgagaagcttctacctcatcttttttaaattcatctttatgtgtatcatagtattttttcatttcttcatctgatattttagtctttttagcaaagttactttgatagttttgcattgctaaatctttctcttgttggtctcttaaaaactcatcatctatacctaatttcttaagttgttctttatatttttcatctttacccatagcgtcttttaattctttaaaacttttttcaacatcctcttttttaggaagtaagttatcttttttagcttgagaatatattacttctgtagttataagttggtcaagaattaaatctttaaacttgtccttgtattttacacccttttcaacttccttatcccatatatcttttccataagtttgttccatagaatctttataaagagctatagtttttttaaattcatctgatgatatctttgtaccttcaactgttgccacagtttctcctttactagaactgcaagcagtcacagatactaccaaaatcatagctattaccaatgttattacttttttcaaatttaaaacatcccttcttaaatttacaagttattttaccttgcacatcttttctaataattcttctaattctgtaactatattataacctattttctgtttagttctatactttgttattggaactaataatatttcatcttttaattgtcttatcttttctatttttaatatcttacataacgattttatataagctattgtaagaagtgtctggactggtttaggtatatcagagaatctatcctcaagttcttcttgtatatccaacatgtcttctttgttttcaatagaagctattttcttatacatttcaattttaatcaactcatctttgatataattatctggaatgtatgcatttacacttaaatctatttcaacatcaatttcctccacaataggttcacctttgacttttttaattgcatcattaagcattttaacgtacaaatcataacctataactgccatatgaccatgttgttgagaacctaaaatatttcctgctcctcttatttcgaggtctctcattgctattttaaaaccagaaccaaactctgtaaattctctgatagcttttaatctcttctccgctatctcacttaaagttttatctttttcatacaaaagatatgcatatccttgtcttgaacttcttccaaccctacctctcaattggtaaagttgagccaatcccattttatctgcatcatatataatcattgtatttgcatttgatatgtccataccagtttcaattattgtagtacagactagtacatcataatctttatttaaaaatcctaggattatattttctaatgatttagaagtcattcttccatgtgcaacagccactctagcatctggtacgagtttttgaatcatacttgccatttcttcaatgtgttcaactctattgtatacaaaaaatacctgtccacctctacttaattctctctctatctcatcttgaattacgctttccttactctctgtaacatatgttattacaggatgtctttcttgtggaggttcttctataacactcatgtctcttattccacttaaagacatatgtaatgttcttggtataggagttgctgaaagtgtaagtacatctactgtagatttaattttctttaaagcttctttatgttttactccaaatctttgttcttcatcaatgactacaagacctaagtttggtaaatttatatctttggatattattctatgtgttccaattaaaatatctactaatccttttttagcatcttcaataatctgtttttgttgttttggtgttttaaacctacttaaaacttctactctcaaaggataattttcaaacctctctttgaatgtattataatgttgttgggccaatattgttgttggaaccaatacagcaacttgtttttggtccatacaagctttaaaaatacttctaatagctacctctgtttttccataaccaacatctccacatactagcctatccattaccttacttgattccatatcttttttagtttcttctatagcctttaattggtcttctgtttcttgatatggaaacaacgattcaaactctgcctgccaaggtgtatcttttgaaaacttatacccttgtattttttcacgttttgcataaagctcaatcaagtcttttgtcatatcttcaatttcttttttaacttttgcttttgctttcgtccactcatttgttccaagcttatttaacttaactttttctacttctgcaccaatatatttttgtactttgtccatctggtctattggcacatatagattatctccaccttgatatactattttcatataatcttttttaatagcattgactgtaatttgttcaatccctgtgtatctacctacaccactattttcatgaactacatagtctccaacacttaaatctaaaaaggattctattttctttccttttttaacttttttattgctagtcttagacgctcttttataaacacctatcatttcgttatctgttataacaacaaactttatagatttatactgaaaaccactgtttatgtgtgcaggtacaattataacttgtgaagatttaatttcaatatctctatctttagaaatggtcgtttctaagcctttgtccaataaatcttttcctaatttatttgctctttctaaggtatttgttgctaaaattattttgtatccattatatttcagccgatttaattcttctacaagcaaatctacctttccattaaatgtaggaacttctctactttcaaaatttattatagattttatagaaaagttatttatagactttggcaatagcgagtttaataccacagacttgtcttttactaagtactctaaatctgtatagtgatataacaatttaccttggtttttaatagccagacctctttcaagatttaatttataattttctctaaactcatttatataattttcgcatctttctttaagtctcgttatatcattaataaatactattgcatcatctgctaaataagtaaatatacttttgttttcttctggataaatataatctatatagttctctgcaccttcaaaataagtcttacttgatatataatctatattttgaaatgtaccttcatcagtatttttagttgtttctttttttaatttaactaatgcatctgtagttttttcgggataaataaattctctagatggagttatagagaattgttgcaatttatcaattgatttttgtgaatatacgtcaaaagttcgtatggaatctatctcatcatcaaataattccatacgaattggatttgtatattcaagtgaaaatacatcaataattccacctcttatactaaattgaccaaacccctctatttttgaaactctttcatatcccaatgaaactaatttctcagttaacttttctaagtctaagctatctcccaccttataatgagatacactatcgagcaaaacttgttttggtatgtattttcttaaaactgcctcaatagaagttactaaaatgattttttctttatttgctagttttaacaatacttttaatttctttgcttcttcgtttctgtcctttgcatccaagtgataaaaataaatatcttgaaaacctaaatattcaactttatcttccatataaaaacttaaatcttcgtatactttctttgcttctaaatcactactcgttataaaaatcatttgtcgtgataaatcattaaatatagaatacgatatatgaggtttttgtactggtaaaagtccattaaccaataatgagccttttgtattttttatacagtttattatatctttatactcttttgaattttgcaaaggatataaaaaaacatcattcatttaaatctccctctcactatccattatatttgttcatagacatatctatattttctcttattattgagtcaatagcatctgccgctttttctaatgcttcatttatgttatcagattcttcttttctaaatctagaaagtacaaagtctgctaagtcttgaccagcttctggtttagatacacctactctcactcttggaaagtcatttgaacctaggcacttagttatagatttcatgccattatgagttcctccacttcctttttttcttatacgtatctttccaacttctaaatctatatcatcatatactactactatattacttaaatcaaccttataatatttatatatatctattaatgtttctccacttaaattcatataagtttgtggtttaactaataatactttttcagtacctactctcccttcaccaatcaaagctttatgctttattttagtaacactaatattgtattctttagcaagaatatctataacatcaaatccaacgttatgtctagtcttctcatacttctttcctggattacctaaccctactactacgtacatttcttacctcctgttatataaatttgtataacaaattataataaaaattaaatatattatactctgtaaatattattaaaattgttgacaaggaaataaaaggtgtaaaaggaatttgctttcttatatctacatctttaaatattttagttatgtataaaataataaaaaacaaaaacgctaaaataaatgataaaactatcacataaaacccataattatttcccaatgcaaagcaacataagctatagagacctacatctccatagcctaatccttttgttagtttagcaataatataaggtataataaagcctatcaatagtccaaatatatgatttatataatcaaattgagctatattgaaaaaggccaaaaaaattataccttgaactattataccactaactattgttatatcatatacatatattgtgtagtaatctacaatggatataattattaaaaatggaattaaaaccatatattgtacacattctacactaatcccaaattttagatatattaatacagataaaactacagttattatgtaaataaaaaacgtattatataaatttttcttttctctatcacaaaaaacacatagagatttatttatcaaatgtgcaaaaaataaggaaattattattatatactccatagtttgtagcactttagtaatagggttaataataatattgtccttattaaatactttaattcatttttttaaattaaaactttatttaacttgactatcatctatataaccatagaaaaataaagttcaagtaattgctttccacataagattgttattaatgctccaatagatataaaaggtccatatggtataacagaattatattcctttccttttattctacttataattattacacagattccatagactgctcctacataaacgcttagtaaggctgtcaaaagaccatttttaacacccatgtaaaggcctagcattgcaaatagtttgatatctcctccacccatacactctttttttattacaaattcaatcaaaagaactataatccagacacttcctccacaaataaaaacacctagaattgaatccttaactggaatttctttaaataaaaggttaaaaatcatagaaaatatagctccaaaaatcaatattttatctggtattataaagtggtcaatatctataaatgtaattataatcagtaaagacacaagaaccaaataataaatagttgatgtagatattccatataacataaatactgttaaaaataaaattcctgtaattaattccactatagcatatctactagaaattttctcataacaatatctacactttctgccactcatcaaatagcttagcactggtattaagtctattggctttagtctagtattacaactcatacaatgggaaggaggtctagaaatagatataccttctggaatcctaaaaatacagacgttaaagaaacttccaaacactatacccactataaatacatatagattaacgattataatatccattgtagtttactccacctatcattcttgtcataaactcttggtcagtacacctactaagtgccatatcttttgtaatctttccatttttataaagttccattaaatcttggtccatagttttcatacctactttaactccagtttgtatcatgtttggaatttgatatgttttgccttcccttatcaagttttttattgctggagtagcaaacatcaattcaattgctgctattctgcctttcccatctgctgtaggaagtaactgctgtgataccacaccttcacaaactgtagataactgtgtttttatttgttgctgttgggatggttgaaacatgtctactattctatcaattgtcttagctgcccctactgtatgtagtgttgaaaatactaaatgacctgtttctgctgctgttaatgctattgaaacagtttcagggtctctcatctctcctattagtattacatctgggtcctgacgcaaaatagctctaagggctgaatgaaaactttctgtatcagttcctacttctctttgatttactaaactttgtttatgatgatgtacatattctatcgggtcttcaagtgtaattatatgtttttgttgtttttcatttattatatttatcatacttgcaagtgttgtacttttaccacttcctgttggacctgtaactaaaactaatcctttatgcttttcagtaaaagattttatactctctggaaggcctaatttttcaaatgttggaatttctgctgttatagtccttattgctattgcgtaatttcctttttgcctatatgcatttaccctaaatctttctcctgtttttagagaagctgaaaaatcagcttctccatgttcttctattactttaaaaatagattcccccgctatgtcttttgccatttgcattgttacttctgatgtcaatatttgttcacttagttttacaaatccaccttttactctagctacaggatttgttccaactgttatgtgtatatctgatgcgtttagtcttataccttgctctaataaatcataaatatacataatatttactctccatatcttctattagtttacttatttttttagtagtaaataataaaattattttattatttatttatactaagttgcttcttatatttagtttacttttttgtatgaacttatatcatgattaatcaaaattttatcttttatatcataatttccaactacatttgtatctatatttagattaaagtttacaatggcgtcaaccttatactttgaatttgaattttcttcaacacctaaaccaataatattttttttaccatctgtaacttctacttcttttattccatctttatcaccagttaccattaagcttaactccgcccctgaaccattttcttttaatttaggccatccttcttttgtcatgtcgtagtcagccttataaaaaggtatttttatagtaataccttctgttttatcaatttcttgtggttttaattcttttaatctgcattttatctctgctaaaagctcattttgtatatagtcaaaagttgttatcaaagccatattatcatatttaacaggtattttctcataagacatactttttagttgattacattggtctgatatttcatacaataactctttatactttaaaaaattttttgctgtattttttttaccactagatatattatcgcttaacttctcaaattttcttacattatttctcaaatgaactcttaaagaattaaatccttgagtttgatttggtaaaatttccaataggttttctaatgtatcccatttactattccagatatactccatactatttattataggattttgtattagttcataatattgttgagaatctggaatcccattagatacttctacttttggctcatctatatgaaacgtatgtctatactcaatcatattttgcatcgccaaagaaatgttatctaatgccttataagtatgtgaaaaggctgaatttaaatgttcattttcaattttattttcttctaaaaacattttcaaaagaatatcattattcactaactttgcctcaatcaatgtagttgagtctatatcttctttcagaatatattcatttattttactaatatctccagaagtataattcttgcaaatttctaagatagaatctctatgtgaaataatatttgcatctacatattcaatgtctctatagtccaacatatctaaatcatatagctttttcaattccatactagctttttccaagtctgaagaagctttatttaaatagaaatttatattattcatatatccaagtctttctgcttcaatatttttctcatcttgattattaaaatcttcatctgatatatttcttaattttgacctagatatggatttttcttgattttcacttttaaactcattatccattttctcaagctcatcatacaatttttcatatgctttatcaatactattttccacacatgtctctgctaaatactttgcttgtataccttcattagtagtctttgtagattttattctattagctatctgatttgaaaatatcaatccaacaatagaaagcaatgctactacaatcaaaactaaaactaaagctgcccctctttcacttttaaatttattccacttcctcaaaatctcacccccaagtaaaattatttatctttaaatatttcagttacaattttaacctcttttttacttgaatagtcattcatgcttttcccagttacagctattttatatatctgaccacttttatcttctacaatagtctttatcttatttgtaatatttcctttgtcgattaaattaccatcttcatcttttattgttgtaatcttttcatatggagtatcatataagctcacgtcaccttcactaagaactttatcatatacaactttttttgatttatctattaatttttcatatacgacagttccatcttctagtttatctaaactatcaaaatcaaattctccactttttatcttttctcttagattttctatttcactttggacatagtttaaggaagttatatctgtgtcatttttagtgtttgctttgttattagtattgataatattaaaaaatgcaaatagtacaattcccataatagccatagctactaacacttcaattaaggaaaatcctctttcactattctttttactcatattttatcaacctacttattttttaataaattcttattaccctattcttgacataacatcaaatgtataagttttgttatttaaattgctatttttatgactttcttgcactgattcattatagtatatacttacagtataaatagatttaccagtttgcttttctattttaaatggtgtttccttcatttctttattgttttgaactagtggttgattatagattatctcttctctaacttcattttctgtatcaattgtattgttttggattctcgttacagaatatacctctgtattttttttagtttctatagaaacttcatattttacaacattatctggcatctctatattgtattcataattattacctgaaccagttttagttagctctttacagttttccaaatctctatttagatacttattaattagattaatatttacttgagcatctgtaataatctgttgcttttttactgctgatgttataccattgaacactttataagaaatacttaaaactattgtcagtataaaaacagctattattacttctaataaagtaagacctttttcattatttttgtacaaactcatcacctatctttaaagcttacttagctttatttagcactagacttaaatggattatattttcctggtctccatgaagatggattatctgtatcaagtatcattgtagtattctctttagtgtacattataaatttaaatgtagcatctactacaccttctgcctttggagctacgacttctttttttgcttctttttctgttgcagctctaagtacacaagtattacatagataattagtagacctatctaaaagtttgtcattttttagaatctctccttcttttatcaatggacaatccttatataaatgccacttattttcgccttccacccagtatatttttgtatctttatttatgttcacatttttaattaaatccttattgtttgttgtttcttcctcttctttttctggttctatatatgaagtcattgtataatctagtatttgagtaacatttttttgttcttctaaataagccattaattttttgacatttctataatcacctctaacacttattgttgttgatataccataaaaatgttcgtattctttaacatttccaacgtcataactagttaagtcaatattataagccttcatttttttatctaaacctattaaaaaaagaccatcttgcatatcatataaaagatttttgcttttttcttttaattcactttcaacttcttcaagttgtttttcatattttggcataagtgcagttttctctttatatatatttaatttttcagtagcctgttttacagaattttttgtagcaatatatttctgatattgagggtaaagtccaaaataaccatatgataaaatagctaataaaattataacctttataagaatcccttttagactaacttccattttaaatatatcttttatatcttttttaaatatatctttattcattagttaatacaccttctttcaggtataatgtcatactaaatgtatagttagaatcttctgcattactttttatgctatgtaatttaacatccttgaaatagtataatccctttaatttatataaaaattgacctacataagaggaatctttagcatttccttctatatttataacatttggtatcttatcatacaatggagttttatcatctttatccgtgttattactattagtctcactatttccagttaatgcttctgacacatttgtagtcttatcttcatttaaatcattatctgttttatctccattactatcacttttcgtacttgattttgtttcattgttacttgatttatctgttgtagtcttattactttttgaattatcagctttattattagttccaagattttgataagttgttgataaacttgttagttcaactttacttggagtatttttatctatatcatccaataaattttcccactttacctttttcccaattaacatatcatatacctttatttcttcgcttttactctgtatcattttttctatatttccaatctgataatatgcagattcaatatttcttatttcaccattaacattttcaagttccttatttgctaaattatttgaaaaaattaaacataaataaggtatagcaagaatcaaaataactattggagcaattttcagtatgtttttcatttgtttagcttttatctgttttctaagtatatccattggtaaaaagtttatattttcaaaatctcttttccctttaggttctatcatacttcctaaaagctctacaattgaatttatatcatcttcatctatatctccagttatcatatcagatatatccattatctcagtaaggccttgagaaacatagcttgaaaatgcagagctaaaagtttcataaattaatttattggaatatctttttcctaatattaatatagtatccgtaaccttaccaaagtttcttgacgaatagtaattcataagaccttttgattcttctactacatttaataattgcatgtccatatctttagcagttatctttataggtatattatcactaataaataaagtatctttcttatatatatttataattgtactattgtcacttatattggttaccattatatcattgtagtctaaatttttaagcattcttaagtaagctgttgataatgtatctattctatctaatactaaatcaaattcatgcattatctctacaattgcatttacctcttccttttgtatagctccaatgataagatttaagcttgattcatcgccatctgaattatcatgtgtttcactagatacttcatacgaaaatacatattcatctgactccaaagccatcatttcgtccatctctagcttcataaatccatctaaatcctttttgtccatattaggaagtttttggggttttaaaattacatctcttgtatttaaacaaaaaactacatgtcttgattttaacttaacattttctaatgcgtatctcaatagagcatacttttccttagaaaaatcttgtgcaatatcctctattgaaaacacattaaaattttttacataaaacttatccttatcgtgtttatatctgccctcaactatggaaatagaatcgccataatatgatacataaaccttattcatttgtcctttccctcctacatggcatcatatatactaagcattggcataaatattgatacaaccagtatcgcaactataataccaactgcaattattaaaacaggctctatcattgaggccatcctatttaaataaatctcggattcatactcataaaattctgccatctgtctacttatattctctaattcccctgtctgctcccctatagctatcatctgtaccaacacagagtcaaaatacgtatatctctctaaattttctgctaagccttctcctcttgttattccatctttagctgatgctaaaatcttctctgccatggtgttatttacactatctataatataatcaagcccttgaactaatgggtatcctgttgatacaaatagatacaatgctcttgaaaatcgtgtagctaccatacaatttattccttttcctaaaacaggtatcttgtttataactctatctttatgagcccttccaactgacgtttttaaatattttttaaactgatagataaataatataataactaaaagtactattatccaaaacttcttcataaacataccaaaccccataacaattcttgttataagtggaagagttgctcctactgttgtaattgaattaatcatcttaggcaccataaatgttgtaaatataaaaatcattataaatgaagaaatcaaaactattaatggatatgttgcagcatttctaagcttttgtttaaccctgtgttcacttgcataaaatgaagccatactttttaatacttcatctaatttacctgtagcttcacctgtagctaccatagcaccaagtaactttggaaactttgattttgatgaaagcattgaatctgcaatagtagaacctacttttatttctgccactatacgattaatttcttctcttaatgtaatgttagttgaccttctagctaatgtttctaatcctgaaatactatttataccagaagatactataatagcaaactgtctacaaaagtggcttatctggtcagctcccaagtctttttttctctttctactagataatcttatatttttatttttgctttctttgatttcaataactctaagatttctctttctaagaagatttctagcttcattaaaatcgttggcttcaatcacatcagtttgcttttttccgtcctcttttattactgtgtatttaaaacttttcataatatcatcctttaatcagtcatcaaaattattctaatcatttcttctactgttgtctttccatttaaaacctttttaactatatcctcttttaagctaaccatgccttgttttctagccatctttaaaatttctctttgatttgcagatgaatctattaactcttttatttctggagtaatttcaagcatttcaaatatacctagacgtcctttatatccagtattattacacctttcacaaccttttcctctataaatagttactgattcatttacatcaataccaagagcctttttttctccaatatctgcttcatatgaaaccttacaatgctcacatatttttcgtgtaagtctttgagatattacacctaaaacagatgaagttattaaaaaactttccacatccatatctaaaagacgtgaaattgctccaactgctgtatttgcatgtaatgtacttaaaactaaatgtcctgtaagagaagctctaattgctatttctgctgtctcagtatctcttatctctccaaccattattatatctgggtcttgacgcataaaagctctaagtccgctggcgaaagtaagccctgccttttcatttatttgagattgatttacaccaggtaattcatactctatagggtcttctattgttaatagatttctattttctgtatttagttgatttaacattgaatacaatgtagtggttttcccacttccagtaggaccaacaaccaatataagaccataaggagtgtttatcaattcatcatatatcttagagccatgttcgtctattcctagtacttctttactaaccataaaattactcttatcaagaaccctcatagctatcttttcatccctgttagttggcattgtagaaaccctaaaatctatgggtttattatctacttttaaatagattctaccatcctgtggtattctcttttcagatatatttatatctgacattatcttgatacggctgattactgccttatatggtgctgagttcatcctcatatattctcttaacattccatctatcctaaacctaacacgcatgtaattttcactttgttctatatgtatatcacttgcttccattctaacagcattttctagtatgttatttactaatcgtactattggagcagcatttacatcttcttcaagtattactgtttctcttactccaccagttctatttttgttgtactcagtcattgccttatttatttctgaatgtgcataagcatgacctattgctttgtttatatcttctgtacttgatataaatatctctacgtctttaccagacatacgccttacatcttgaactgcttctctgtcttgtgggtctgacatggctagacatattttatttccatcaattttaaatggaaatacagtatatcttttgcatatattttctggaaccatctttgtagctaaagtgtctatttctgtcccttctaaaaatatactttctatatccaagagttcttttaatacacttattagtaagttactatctataagcccttcttgtactagaaattctcctagtctttttccactgtttttttgttctgatagtgcccatttaagctggtcttctgttatatatcctttttcgaccagtttgtctcctattctaacttttttagccacaggtttcactcctttactatctcaattatatcatcattcataattgaacattaaagaaaatagtataaaaaaacaggaagattttcttcctgtcttttatattatatttttcattaaatttacaatatttttataaaaatatagttttaactattttgttgagtccatcacagtattatctataagtactatatatagaactttattatctacttttgtattacttgttaatggatttcccaaattatctgctgtaacacttgtatatattttattttcacctatatcactcaataattttgctgattgtgcttctgttaatgtaactccttcatcatttgtacctatctgtaataccaatttattaccaactttaatcaatttatattttccacctatatcagctttatcaggcagagactccatataagtctctaaaacacttaaaccagtttgaccatctggtgtaactggtatcttattagtatctgaataataagataatgctgcactcttaactgaactataatcagactcaacacttgctaccttagccttgtttatattactaaataaagctggaactgccactactgctaatatacctataattgcaattactaccaataattccactaaagtgaaaccttttttattcttttttaacttcatttttattcccccttaaattttttaattaatacttacttataatatatctggttaaaaatctaagtaaaattatttaaacgtactaaccaaatttatttctaacacataaccattttttaaataaaaaaagctatgaaaatgatagtatctataaataaatacaatttcatagccggttgcaccactaactcaatatgctctaaggtgcccacattacagaacataaatcaacgtttctattttattaaattcaaaattatataactcataatgtatatacatatccacttatattatataatatctaccatattttagcaacactgtttatactatttatatataccaactttttacatattgaaacagaatttctagaaaaattatactctacaaaaaaaagaaacatctccctacaattattatatatcgtaaggagatatttataaattatcatttagttttatcattgtcatttccatcctttgctaatatttatttgaaagctaaaagctattacaatatagtattttataaaatcatctattataaacattctatctattatagttatgattcagccacaatcattatataaacgaaactcttcatttacagctatgcttattgtgcaaaattactctttacagtaatcttatataatccagaaccctctcacaaacactaaagatagaatagatactattttcaattcttataaataaactttcaatagatttttatattcactttagattgtgactgaatcatttaattattaggggttcatcttctaaccttcccattggaaacacctctttctttatttatatttacataatactacataatctgaattttttcaatacttttttgtaatattttttatattcataatattttgaataatatgccctttattaagtttattttacttaaatatacataattttaaactataatctctttttacaataatatatacctttctaacaagaaaaaaataacattccataagtataaaatcaaaaaagagttgctcaaaaggtttatatccttttaaacaactctcataaatacaataaattagaataatttacttactgattcattagagaatatcattcttatagcatctccaaataaaggagctactgtttttatctttatcttatctattcttttctcttcaggaagttgtatagtatcaagaactattaactcacttatttctgaattagcaattctttcaatagctggacctgataacacaccatgagtacaacaagcataaacatcttttgctccaaactctttaagtgcatttgcagcattaactattgttcctgctgtatctatcatatcgtctaatagtataacatttttacctttaacatcacctattaagttcataacttcgcatacattagctttcggtcttcttttatctattatagctattggaacttctccatttaaagtattagcaaattttcttgatctagtaacacttcctaagtcaggagatactactaccaaatcttctattttcttttcattaaaataatttgctaatattgttccacctagtaagtggtctaatggtatatcaaaatatccttgtatttgagctgcatgtaaatccattgttaatactctgtctgctccagcagcagttattaaatttgcaactaatttagcagtgattggatctcttgccttagcctttctgtcttgtcttgcatatccatagtaaggaatgactgctgttattctacctgctgatgctctctttaacgcatcaattaagattaataactccattaagttatcatttactgggctgttagtagattgcactacaaacacatcacaacctcttactgtctcattcatgtttacacatatttcaccatcactaaatgtacctacttcacaatctagtactgatacacctatatagtcagctattttttgtgctaactctttcgatgaattacctgcaataattttaatctcgcttccgctagtattcatttatgtaaccctcctgaaaattttaaaatactaatgaatataatttataataatttcgagctaaattttttagccaaaataataaactacataattacttactttggtcgtctttttgattctttttttctacccatccttctttgataacttgtctttctcttgctattgccaaagcaccatctgggacatcatgtgttattgttgaacctgttgctatatatcctttttcttctacaactactggtgcaactaaattagaatttgaacctataaacgcattgtcttttactactgatttaaatttatttttaccatcatagtttacaaatactactccacatccaatatttacatttttaccgacatgtgcatctcctatataagaaaggtgagatgcttttgatccatcttctataatagcattttttacttctacaaaatcgcctatttttacattatttcctaagtcactctttggtcttaagtatgcatatggcccaacattagaattttctccaaccttactatcaattatagttgaattttttatttctgtaccatcacctatttctgaatttgttatagatgagttcattccaattatacaatctgaacctatccttgttttcccttgtaacataacacctggatatattatagtatcattgcctatcataacatcagattctatataggtagagttagtgtctattatagttactccatttaccatatgagattcatttattcttcgtctcataatttcttctgcctttgataattctactcttgaattaacgcccataagttcttcaatagttgaacctgcaaatgcaccaacttttaatcctttatctctcattattttagcagtatcagttaaataatattcaccttgtgaattgttattatttagcaaatctagtgcttctctaagactctttccattaaaacaataaattccagagtttatctcacttatcatcttttcttctgaatttgcatctttttgttccactattttaagaaggtcacccttcttatctcttattattctaccataacctgttggatttccaactcttgttgtaagaactgtagcatgatatttattttctatatgatattcaaataatctcttcagtgtctcttcttttataagtggagtatctccacaaagtacaactattgtatcttcatcattaatatattctttagccatctttacagcatgtcctgtcccaagttgttctgtttgcatggctattataatttcttctgcaagcttttctttaactacctcagcttcatgtcctaaaatcacgacagtatcttttacccctgatttttttgaaacatctataatatggttaaccatttcttttccacatactttatgtataacttttgggtatttagacttcattcttgttcctttgccagcagcaaggattatagctttaaagttcattgatacactccattcaatctaatttaattttattcgtattattctcttaatcaatatacattataatacatttatctaacaatttgtatacaacatatacattatcactaataatatagcacttttttactaaaaagtacatattttaatagaaattctacatttaaaaagagcctaaatgttcgggctctctccattttatatatttattattcagcagctacttcccattgaactaatgcttcatgatatgcttgtaaaactgcatcttctaaaacttgtctcatttctgcatttattggatgagctatatctctgaaatttccttcgcctacttttctgctaggcattgctataaatagcccattatggccttctataacttttatatcatgcactacaaacaaattatcgaaagttattgaaactatacatttcatcttaccttcttctgttaattttcttactcttacgtcagttatcttcataccaaaatatccccctttgattttgacagaaattaatttatattaaaattattatcgctggaataaattaatataaactgttttttaaataattctatgaacaactagggatatcctctttttatttttacatatttttctaaatattttttttattaatcttcatctatctcaaattcaaattctgaatcttcttcttcgtctaaatcttcatttctatattcatctttaaaagtctttaagtttggttctactactattttatctccattaacatccaattgaatcaatgaaatataatcttttaccattttttctgaaggattcgttgtagatatgaatactccagtacctataacctctgcaccaaattcattcataaggtctaccattccttttatagtacctccacccctcatgaaatcatctataattataactttactatctggtttaagagcttttcttggcaaactcatactttcaactttagagctgtttccactcacatatgtcatgctaagtgtaggaccttctgatacctttatatcttttcttattataactagaggtaaattcatagcttttgcagtcataagtgccataggtataccttttgtttccattgtcacaacataatctgcatctacatactcaatatttgatgcgaatatctttcctatcttagcagctattgtagggtcataaattaggtcaatcaagtataaaaaaccaccagatagtattctagacttgtcacatattctctcacataattccattaagaactctgcattttctgctatagaagttttaggtatatattttactcctcctgctgctcctgagatagttataactttacctaaatgtagcttctcaaatacattttttacaactaataaatcttcacttattgttgattttgctgcattaaattgatttgtaaaataacttaatgtatatattttatttggattatcagacagtattttaactattgctccaattctctctgttcttttaaatttcattattatttcctcctacaagtacctttatataacgttaaactaactaatgcataacaattcttattgtggtataatattacttatgttttattatattcaaaaataaaatacatataatattatatgcatattaattataaaatattgaacattatattattataccacataaatagttcatattgtaggacttaattaaaaagaaaggtggttttattatgaatatacactttataggaattggcggtatcagcatgagtgcattagctgaaatatgtatcaataaaggttatcaagtttcaggttcggattcaaacgaatcatacctattagacaaacttagggaccaaggggcaactatttatattggtcagaaaaaagataatatatcagatgatgtaaatatggttgtttatacagcagcagttcatccagacaatgaagaacttgtggctgctaaagaaaaaaataaattggtaatgaacagagcgacttttttaggccaaatcatgagggaatataaaaattctatagcagtttctggaacacatggaaaaacttctacaacatctatgttatctacaatctttgaatatgcagacttagacccaactatactagttggtggtaacttaagtatgataggtggtaatgttaagataggtaattccaaccactttataactgaagcatgtgaatatgtagatagtttccttaattttaacccaaagatatctatagttttaaatgttgaagaagaccatcttgattatttctctggaatagatgaaatcaaggcttcttttaacaaatttggaaaattattacccccagaaggctatttcataataaatggcgatgatgaaaatattgatgacatattgtatgatgttaaagctactattataaaatacggtagagattctgacaatgatgctgtaataaaagatattcactttgacaatagtggtcatggaatatttagaatagaatatgaaggaagagatttaggagaatttgaactttctgtatatggtcttcataacatatacaatgcttcttctgctataatggcagctcttgtttctggtattgacttagagactataagaaaaaatataaaaatttataaaggtgtcggaagaagatttgaaactaaagggtattataagaatgctttagtagtagatgattatgcacatcatccaactgagttaaaagcaactttagctgctgccaaaaaattaaaaaaatcaactttatggtgtatcttccagccacatacttatactagaacaaaatctcttttaggtgaattttcagaggcattctatgctgctgataaagttatcataacagatatatatgctgctagggaaaaagaccctggagatatacattctaaggacttggttgagaaattatatcaaaacaatgtagatgccatctatataaaagaatttgaagatatagtaaaatacttacgtgaaaatgttaaggataatgatttagtaataactgctggtgctggtccaatttataaggttgcagacttgttggttgaaaaataatatataaaaataatttaggctatcaaatatctaatttgatagccttcttaaagtcttatttctttccaatttcaaatatctcatttttaaggtaatcaaataaacttgtatgaacctcatagtaagatacatttttcttagaagtaacttttacataatcttttcccattgtatcaacttttacatcaaaattatcaccttttatatttatagtaaaattatagtcacttctttccttacttttctcaggttgaacttttcctacaaccctctttgaaatcatcttatgtgctaaatcatcaaatttccatctatgaacttttttaatttcttttccatgagttatagtaacctctttccaatctttataatgacttaaaaggtcaaatgaagtatatatactctcatctaaaagtttcttaaaagcatccttagaactaactggtactttataatattcttctttatttacagtatatactctaaaaaagttaaggtcagtagaaaatttaactccatcatcagaataaccttcataaactgcttcgtaagaagaagtagtatttcttactttcttaaaatctgagaaaaataactttatttcatcccacatatcttcttcaatttttatgttttctatatttttgtctgatatataaacctttttcttttcttttatttgagtccttaaagacctattatcttcttcttctttttctaccttctttggcacttcacttttatccttttccatatttattcctattctaaaggatataaagtatattataaagaaaacaactactcctattaatattgcagcttttttctttagttttcttttcttgctcatttaaccacccctagagtttataatcataaaacaattatataactttttacacttttttttaagttttaattaattattacacttatttccttggcaattagtacatggttcaacgtgaactgttatgccttttacaaattccatatgttttattatatgtttttcaagcttggtagcaatatcatgaccttgcttaactgtcaaattttcatccacacatatagtcaaatctacatatgccatagctccatgttttctagtctttatatcaccaagatttttaacaccttctgtatctgctacaataaattttaattcttttatctcttcttcgtcaactgaaacatccatcaattcattaacagaacttataagtatactaattcctactttagctacaaatatagccactacaattgacgcaattgggtctagtggcttaaaccctaaaatagaaccacctatacctataaaagcagctactgaagataaagcatctgacctatgatgccaagcatcagcttttaaggctggtgaatttatctttttagcaacttttattgttattctatattgatactcttttatcaggattgaaataactgatactactaatggtaatattgatggaacacttaatgcatctaagttaaataaagatttaattgcctctatacctattgttatagaaacgaaaataagcaatattgataacacaaatgatactaatgtctctgctttctcatgaccataattgtgctctctatctccaggtctagaagatacataattgcctattagtactcctatagaacttataatatctgatgctgaatgtaatccatctgcaatcatagcgctagaattaccaataacaccagctataaccttaattattgttaatactacattccaaagtattgattgtattgttattttatttgcttcttcataccttgtttccatatttattcctcccttatgaaacaatctaaatattattaagaacctacatctgaacataaattaaacactctcttatatgcaaatgtatactctttgctttcaatagagattatcaatcttctataaaatgaaaaatcacctagcttaagctaggcgatatatatattatacactattatttaaatttatgcttcctttattatctccactaccattttagcagagtcatataagtcttttatagctatatgttcacttagtgtatgagcatttttcataccaattcctaaagttatagcttcgataccattcttacttaatatatttgtatcgctacctcctcctgtagattcagtatgaccttctatacctaagtttgaaaaagccttctttgcaagttttattatttcagaatcctcactaacatctattggtgtatatgctctattgacatctatctcaatttgagctccaaaatcttttgcagctttttcaaaagtctctaccatgtgtttagtttgaacatctaatttattttcttttagacttctggcttctgcaactatattaacttctcctgttactatatttgtagctgttccaccgtttataattcctatgttagcagttgtttcttcgtctattctaagtaaattcatattttctattgctctggcagctaccattatagcacttattccagcttcaggttcaagacctgcatgagcagtctttcctaatatcttaacatttattacatcttgtgcaggagcttttactattatttcacctggagaaccaccactatctaatataaatgcatattcagaatctatttttccatagtctaaatttttagctccaactaatccacattcctcacatatagagaatacaacttgtatatcagtatgttctatgttattttcatttatatatcttaagccttctaatatagctgctatacctgctttatcatcagaacctaatattgtagtaccatcactttttattattccatttgcttcatccactataggttttacccctatacctggagttactgtatccatatgtgaactaaataatattttctttccttctttatttccttttaatgtagctattatattaccagtttctccatttgctttttcaccagcattgtctattactactgaacaacctatttcttctaattttttaactaatactttagcaacattcccctcttttaaagataaactatctatctgtactaattcaagaaactcatttaaaattctttgctcgtttatcataattttcctccataatataataggtatttcaagatatattgtagtgtaatatttaaatattatcaatagtttttaaagttttgtactacatttcattaattttttcagtaaaataagaattgagtctaaattttttcatttttattatttttacctaactatatttctttgtctagaatctataaaacatagccaatatcctaaactatttgttctattatcacaagcttgatatcttaaaaatcctgtgcttccattgtctggctgttcatttctatttcctgggatagcataaatataatgttttctcttattatattcatcatactgaacaccaaataaatagtgtctgtatttatatgaatgtaaaactgcatcactatacatagtgtaattcaatacgtttaaatatcctaaataaggcattgtatatccacacagtgttgtaggatttatctctattttccaccatcttgtcttatctatataatctgttacaaaaggttttacttctttaaataatttcaaacctttttttatttgtcttggcataagtaatgtactggtttgtttatttccactctctccttgacttactccattagctctttttattttttcaatattattctgatctttttgaactttctttgatttagtaggttttgaggaaacaaacctatcttcttctctatttacttcaaaaacttcttcttcttcctcttcttcctcatcatattctatgtctatatattcttcctgtactttaaccctattataattttctatttccttataattattgaactcttctatttcctcatcaccagaatcttctacttccgttcttgcttttaactctccttcttcaatatcttcatcatcttcccaatagtcttcatactcatcttcatcatattcttctataatatattcttcttcactatcttcgtctctatcactttcctcattatcctctatctcttcgtcttcttccaactcttcatattcttcatattcttcatattcttcttcctctacctcttgaaataatatgtcctcataattttcaagcttatttcccttaaatccaattaaaggtatatttctttcatacaataatgcaataccttttatctcatcatcagaatcttctaaatctaaaacaaattcacctcttccttgttcatttaaaattatatttcctaagtctattaatccatggtcatcttttattgctactgctttatacccatctttaacatattttagattttctacatataatgcaataattgctttttcatcatttacttcaacttttgcaaaagcttttggcagtactcgttctttgtatctaaagtttatgtctttagcttctagtattatatagtctcttttaaactttcttttagaacccactgcaatccccccttaacacagtttctctaaacaatatatgttaacaaaattaaaaaaagtaccttctatttagaagatacttttgtatttattatatttgaaagaactgaaaactcttctatactaagagtttcaccccttcttttttcgtctatattagcttcttttaatatttctcttatttcatctttattaagaaaaccaagacctcccaacgaattaagaagagtttttcttctttgtccaaaggatgcttttactgttttaaaaaatatgtcttcattatgaacatcatattttcttttatctcttacatgtaaacctataactgtggaatctacatttggttgtggtataaacatatgtcttggagcttttgccacaatctctgtatcacaatagtattgaacagctatagataatgccccataatctttagtacccggaatagcattcattctatctgcaacttctttttgaaccatgactactatgtctgttacaggtatgtcttcctctaaaaatttcataactattggagtagttatataatatggaagatttgctacaagcttaactggtccaccatttaatttatcttttactaattcctgtatgtctacttttagtatatcttgatttacaacctctgtattatctaaatctgacaaggtatctttcaatataggaattaaatttctatcgatttctatagccactactttttctgctattttacccatctcacgagtaagagttcctataccaggtcctacttctatgatattatctcctcttgtgattctagctccagataagattttatcaattatattactatctatcaagaaattttgacctaaagactttgaaaatttaaaattatatttttgtactacttcctttgttgcattatgtgaagatagtctatccattatttactcctttttaacttattttgatatttaattttattaattatacttatttatatgtatttacattgatttaaaataaggtatatattataaataatttatcttaaattaaccgtaattccacaatttattttatatacatatttttcatacattaaacattacgtttagatttgttttaatgcatctataaattcttctctttcaactccataattattcaatctatttaaaaattgttttgcatttccatatccaattccaagtatttttccaagtgcatctcttctaagtgatgcttcttcattacctataagaccatttctaattaagtcaacttgcttaaattcatctcttttttctgtattttcagttctaactttattcagagctgctattatactttgaggagtagcattctcaatacctatatctccatcctttttagcttcctctcttggtagaaatgcatgtttacatcctggaacttctgatgctattttttttcttattttttcacctgcaaaatctgggtctgtaaatattataacaccacgtctttcattagcagcttttatacgctgcattacaccttttggaaatccaaatccacctgtagttataagttctgcatctattgctctcttaactgctgtaacgtcatctctaccctctactactattatttcttttatcatataaattcaccttttattcgtttttagtttttctttacatctctttattttaaggtttttatttaatttaatcaaggtactaaactatttatttttatatagaaatatgcattttaaataaatatatcaaaagagcctagatgtaaaacttatattctaggcgctttttgtactaaattttattgtaaggcttagctctctttttctgtctttccatcatatttttctatccatttatttagtatagcctctctatttcttgctgctgattttaaatcattatctatcatctgttctaatggattctttggaaatccttctggcaccggatttcccgtgtcaattgtagtaactgcaaaattcttagaatactcattcattgcatctttacttatagcccaatctaaaaatacttttgatgcttcttttatattatcttttttcacaagtgcatttgattctatctcccatccagaaccttcttttggaaatactacttctactggataaccttcaccttttaactttatacctctatttccaaaagatataccaatgggatattctcctgaagctgctaatatagctggcgctgaaccagactgagtgtatacaccaatatttttatgcaatttatccatatactgccatgctttttcttcacccataatttgtatgagttctgatactgttaaatatcctgttcctgaagaagctggactaggcatagatataagatctttatattctggctttattaaatcttcataagaattaggagctgatatgtttttagcttttaattctttagtatttactgttataccagtcatccaagcatctattccaacccaagaaggaactttcttatcatctttaaatgcaggatttaccttatcaaagcctttcggagcgtatggctctagcatttctttgtcatctaaaattatcaaacttgtagctgcaacaccccataacacatctgctttaggattatctttttctgctaataatcttgctgttatacctcctactgataatctaagtacattcaatttaatatctggatatttctctttaaatgtagctaagtatgtatctatactatcttcctcaattgctgtataaactgttaactctccttttgtcttattattagactttaagtttgaacctgatgaaacattactacatccagttattacactcaataaaagtgttgataatattcccaaagagactaacttcttaaatttcatttttacctcccttattcaacttctttttgttgccatttttatgtcttggtttttaatttttttattatcaattcatacaaaagttttactattatatttgttaaaagcactaatacttccataacagctgatggtcctatatacaacactatatcatctagctttagtttttatatcgatacggtctgagtttgaggtctataatttctttgaaatctctattaaattctacccttatatcttctggtctaattgctatcatgtttatatcatcatccataaaatctattgctcctataaaatcagctactcctagagctaacctgaacttaaataattcttctctagttaaatattcttacttccaattttaagttatccagaaacaatttaccttttatttttctctttttttataatatataacaaactgctcaaattaaaatatatatatatatctttttaataatcgctcaatattttatttactttagtttataattatttaatatcttatttactttatatataacatctatactttaataatgaaattaaaatatactattttaaactgtagtatatctatttctaaattaatctctaaaaataaaaaatataccattcaaactgaatggtatacttactctatacatttttatagaatattcacttttcttgacctatattattctcaacttatattattataataaaatctacttaaaaaaattttttctttttactccatttgtatagttttacttaactctctttttctgtcttaccatcatattttgatatccatttatttagtatatcttctctattttttgctgctgattttaaatcattatctatcatttgctctaatggctttttagggaatccttctggtattggatttcctgtagaaatagtagtaactgcatagttcttagagtattcattcattgcatctttacttatagcccaatctaaaaatacttttgatgcttcttttatattatcttttttcacaagagcatttgcttctatatcccatccagaaccttcttttggaaatactacttctactggatagccttcctcttttaattttatacctctatatccaaaagatataccaataggatattctcctgaagctgctgatgtagctggagctgaaccagattgagtgtatacaccaatattctcatgcaacttatccatatactgccatgctttttcttcccccataatttgtataagggctgatactgttaagtaccctgtaccagaagaagatggattaggcatagatataagacctttatattctggctttattaaatcttcgtaagaactaggaactgggatgttcttatcacttaattctttagtgtttactgttatacctgtcatccaagcatctatcccaacccaagaaggaacttctttatcatctttaaatgcagactctatttcttcagaaccttttggagcatatggttctaacatcccctggtcatctgcaaccaataagcttgtggctgcaactccccatacaacatctgcttgaggattatccttttctgctaataatcttgctgttatatctcctgttgatgccctaacaatatttaatttaatatctggatatttctctttaaatgtagctaaatatggctctatactatcttcttcaattgctgtgtaaactgttaaatccccttttgtcttactatcagactttgaatctgaacctgatgaatcagtactacatcctgttattacacttaataaaagtgttgataatactcctaaagaaactagctttttaaatttcattttttcctcccctatgcaacatctttttgctgccatttttgtgtgttattttttaatttctttgttacaaattcgtacaaaagtcttactattatatttgttaatagcactaatactgccatagcagctgatggtcctatatatcctatctcatctaactttagtattgatattgatgcagtctgagtttgaggtatatataaaaatattaatgctgaaacagtaaccattgaatttacaaaataatatactactatttcaagtattgatgttatagacatcggaactgttatattaaaaaatactttatagaatggaatatttatagattttgcaactaattcatactctttatccaacatttttaaagatgaatttgaggttataaaacaaactgaataaaaatgaactacatttactataactaatattgctgtacttccatataaaaaatttaatggattacttgctgagttaaaaaaagttatatatgatatacctaaaactaagccaggtaaggccattggtatcattgataaaaggtaagctgtttgtcttaatttaggaaacttatccaccttttctattatataagcactaaaaaatacaaatatagttccaaatattgctgttaaagttgatattttcaaactgcttaagtatgtttttattccacttcccaaaatacctttaaatgtatagtgttccattgtaaagcttaaattatatggccataactttataactgaacctataactgaaacgaatattaaaataaaaattagcaatgttataaaactacatactattaaaaatactctatctctaaacttattttccttaatcttatatggcatagactttgcagttatggtcataccttgtttcttacttgccatcttatctaatgtaaatgctattagtacaggaattaacattaccatagaaacagtagctcccattggtatgttaaattgtccaactacttgtttatatatgtcagtagccagtacattgtagtttcctccgactaccttagctgctccaaaatctgtaaatgcaagtataaaggatacaaagaatgaactaagtaatgagtactttataccaggaattgttattttgcaaaatttcttaaattcactagcacccaagctatctgctgcttcataaagtctataatcagccatcgaaagtgctacagataatattaaaaaagcttgtggaaatgtaaatagaatctgagaaataattattcctaatggaccatatagtggtacttccagacccatggttgtaaagattcccttatttccaaaaaggtatataagtgaaataccatataacatagttggtgcaaaaagtggaaacattcccatagttttaaaaaaatctttaaactttatatttgttcttgttattgcgtatgaatatataaatgctaaacatagtgatattaaagatgagactgtagatacaaaaattgaatttttaaatgatgctataagacttggattttcaacatatttactaaagtttgaaattcctataaaatttccacttgtatccataaatgcattttttaataatgatactaatggaaataatataaatactattagtacaattaccgaaaaaatcaagaaatatttttgtattgtgctatcacttattcttcttttattttttgatgttatcatttattcacccctagctattaagcacatccctctgatttatattgtacaattccttctttaggtatcttaaagtttattttagaacctatgcacagtttcatttgttctgcaactttggaaactacatctaatttcatttgcttagaacgatactcaactgtaattctatagttaaatcctctaaattcgatatctaaaatttctcccacttttatatccttatctttagaatctctattagactctacttttatatcttctggtctaatagctatcttattaataccatcatctataaaatttattgttcctataaaatcagctacaaaaggtgtttctggatttttatatacctcctttggcgttccaacttgtattatttctcctctattcataacaaccatcttatcagctaaacaaagagcttcttcttggtcatgcgttaccattatagttgtaatgcctagttttctatgtaaacttctaatctgctccctaagtttaagtcttacttttgcatctaatgcagataaaggttcatcaagaagtaaaaagtctggctctaaagcaatcgcacgagctaatgcaaccctttgttgttgtccacctgataattgtgatggatattttttctcatatccacttaattctacaacgtctagaacttctttaacttttttatcaatattagatttacttatgtttttattttctagtccaaaggctatgtttttgtaaacattcatatttggaaataatgcatatgattgaaaaactataccaaaatttctactttcaggtggtgaattagtcatatccttatcatttattattatttttccaccatgtttatcctcaagccctgcaattattctaagcagtgtactttttccacaaccacttggacctagtaaacaaataaactctcctttttcaatatcaatagatatgtcttttaacaccttaacttgtccataacttttacctacattttttacttgtaaaaaagacatttataatacccctcctaaagctaacctaaacttaaataaatcttctttatttaagctcttgcttccaagttcataattatgttgagaataaaatccgtggtaatctgagcctcctgtgaccactagattatacttcttagcataagaaagcgactctttttctagttctttgttgtgagatggatgatatacttctattccatctaatcctacttttaccatctcttcaatagcgctaaaattatccatttgacccgggtgagctaacacacaaattccaccagaattttttatagcttttattgcatctctgtaatccacatattttaaagatacatataccttgccgtttcctctatgaaacaattctttatatagacttgaatatatattatctgtatatcctttatctataagagctttcattatatgttgtttaaatattccagtctttgatgaatatttctttacatcttccaaagatattttgtatcctaaatctataattttatttaccatcttaacagatgctttatgtctgtcacataccattggattgcacaaattttttatttcttgactgtttaaatctatgttatatccaagaatatgaactctttttctatttttataatcataggctgaaatttctatacctggtattattgttattccataatgctctccaagcacaagagcttcatccaatccagataatgtgtcatgatttgttattgctaagatatttatattcttttctgctgctttttttattatttcttcagtagtaaaattattatctgatatacttgtatgacaatgtaactctgttagcaatttttatacctcccttttataaactgtttttccatttacaatagtatttaaaacctttggatattcactatcaatatctactaaaactaaatctgcttttttattttcttttatactacctctttcatcatatataccaactgctttagcaggatttgaggtaaataaactgactgctttatttaaattatttattctttctgcaactatacacatagactttatcatagctgatggaagataatccgaacacacaatgtcacaacaatcttccaatatagcatccattgcttttaaattgttattatgagatttacctcttacaatattcggtgcacctaaacaagttagaacacccaatttttttgaatgttttgcaacttcaagagttataggaaattcagatacatttatgcctatattttttatgaaatccattttttctaatgtatcatcatcatgtgatgcaacatttatatttttagttttggctatacctataatattagctattttattccaatctaaattatcatgcagatttactaaatcatctaaccatgtatctacataattttctgtaactccccacactttagtagcatactctttataaaatgttggatttgtatactgaccttgtcctggagaatggtccattattgataagtagtctattttattttcatctaatagttctaaaaccttttctaaaccttcataatacaacacttcatatcttaaatgaactttatgatttatactcttactatctatatttttatatgaatcaatatttttaatcatctttaaagagttatcaatacttctaactcctactccatcccctaaagatatagaatgataaactgtagttattccatttgcaggtagttttttatctagttcataaaatgccatattaaatggtaataatgtacttggtcttggctctatttccttttcaatggcatcactgtgaatatctataataccaggtattacatataagttttttgcatctattatttcatctatctcattaaagtcaaatgcgtaatcaatcctatcatttgatactttttttattgtatctccctctatgattaaatgaccattttctaaaatcatatcttctaatacaatatttgcattatgaattagttttatcatctaggctaccccactttcacttatagtcccttttgccatagtaaaggtcttatctataacagtttccataaactctatatcatgaaaaattcctatcattgtagttccttgacttttaagttccaacattttttcttttacatatattttagattgattatcaagtgatgcagttggttcatcaagtaacaaaagtctaggctttttaaccatagcttgagctaaatttaatcttaatttttctccaccagaaaaattatttggatacgcatcccataaattttcctttatttcaaattggttaagtatatcttttgccatatcatacgaacaatctttttcaaacccactctcaattaaagaatgtactaccagttcaattgcagttattcgtggaagtgtctttaaaaactgtgatacatatcctatttctttctttctaagatttatcatttctcggtctccaattttagccaggtctacattaccatatatttctgaattaaaaattatttctccagttgttggtatatatgttttatagatactttttaatatggtagacttacctgctccagatttacctattattcctaaaaactcaccttttgaaacttcaaaacttatattactacatgccgttatagtcttgttcaatgcatgtaactcaaagtctttactaaaattatttacttcaagtatagtttctttcattttattaaaaacccccattttgcttatttacaaacgatatttatagcaatgaatttataagttgctgagtatatgggtgttgtgggtcctccattatttggtctgtaagaccagactcaatcacacttccatttttcattacaattgtcctatcagcaagcatctttataacatcaaagtcatgggatacaactatcatagaaatcttaagttctctttggatttctcttattaaatccaatacttccgcttgcacagaaacatctaaacctgttgtaacctcatctaatagcaatattggagggttatttgaaagagcttttgctatttgaactcgttgttgcattcccccactaaagtattttggtttatgatctattctttctacaggtatattagtttttattaaaagttctttgcctctatctcttattttttcaacattatataaatttgccatcaataatttttctgctatattaccaccactactaaagtctaaatttaaaccaaggtggggattttgatacacaatacccataaaatgattctttatgtatctctttttttggtctgaaagctctagtatatttgtgtctttattgtaatgggatatatatacttctccactatttgcatgttcttggaaaaacagtatttttaataaagtgctttttcctgaaccagattcacctacaattccaaggacttctccttcataaagttctaaatttacattattacatgcaactatagaaccacaatacttacatatattattgctttcatatcctgtgctttcaaaacacttttcacacccatctccataaataagattgatatttcttcctattaatacttgcttgtctatattttctaatcttttagagacatttattttactcattccaagtacctcctattgtcacatctatactgttattttttaatctaactttttcacaataacttgtatctgagcaactatagtacttttcattagtgtcactgtcatatacttcatctaaaaatgtatttgtactgttacataaactacagtattttccttcaaacttttcctcttcaaacttataatcctcaaactctaaaggttctacctttgtatatggaggaatagcataaattcttttttctctacctgcaccaaacaagaataaattgtctgacatatttaatttttttatatcaaatctaggtataggtgatggattcattaaatatctatcatttactttacatggatattcaactgctatagatatatcattaaatctaactatatcttcataaagatatacccacatcctactataatcttcttctgaatgcattcttcttgtttctacttcactaggttctactattctaagggtttctggtattggtacttgaaatattagtatttgattagatttaagtttttcttctggtattctatgtctcgtttgaatcaatgtagcttctaatgtatcttttgtggtttctacattacttacacttgcaataaagctccttatattacaagcatttgtagaatcatcacttccttggtcaattacttttactacatcatttttaccaattaatgatagtgttaattgtaaacctccagtaccccatcccttagctataggcaactctcttgaaccaaagggaacttgataaccaggtattgatattgcttttaatatctttcttcttatttctttttttgtgttttcgtctaaaaaaccatagttatatatcacctaaacttacctccacaaactattttattctttctacatccgctttaaaatctacatagtgaggaagcttaaagtgagatataaatcctaatgaatctattccatctatatgaagcaatacaaattcttcatcttgtgctagtttttcactatttggctccaaagatttgtctagtatggccatagatatagccttattctcattattccccatacaaagaccatatcctaaagacatcttatttttatcttccgaattagttttagaattttcagtcttattttgtgatgcttttgaaactatttcacattcagtaaccagcatatcacctattattatttcttcatcttcatagatgggatgttttacttttataaatacattaccagttctaagttcacttatatatggatgttcatcaccaaaacctcttacaatagcataagcaaaacctgacactactccactttcacctctagtcaatgcctgtaactttgctgacctagaaactggaaatcttaaactatttcttgtaatatcatcaataacttcttccaatttgttttcacaaacttcttcttgtaataaattttcttttctaaatatattagatatttttgtaaattcagggatttcatctactgtttctaattcatttataaaactatctctaaaatctctattctttttttcatcttcttctaataattctacatttaatattctattttcatagtctctagttgccccaagatactgacctcctggtatatctttaaaagtagctgatattcttctttttattctcatttcttctgtatttatgggttctgaatatgtaattctaggcattgttgaccttaaagctcttacatagaaagaggcttctaatatatcaccttgagcttgttttatagccaatgctgatagttccttgttgtataaacttccttcagacattactttgtctacagcataagacatttgttcctcaatctgctttacatctataggcaagctatctccttttaccctataaaactcaagtatatttttagcctgtaatatggcttcttctccacctttaactgctacataagccatttctacaatacctcccaacttaattttgatgaccttggtataaatgcaatttctccttttttatctactaaaatcaaatctattcctattggataatctttatttatggtagataatctttctataaattcttctctaattccatttatatatatactatttttagattttataccaggaccactcaaatcaagctttatatacttagtttgagagtacgttgataaatcatttacttgatgtactatagttgcactttcatcaggatattcaaaagaacctattttaatctgtaatatatccacttctgaattaatatctaaaaatatataatctgattttctataatctatttgatttgacactgtaagcgctcttatattttttatatctttttgagtataattttctatatagaaggtaacttcttggtctaataaagtgattgctataccaattgctccattcaatagttttgtattattttctatatttatattatctatattatttaatttcccaggaaacgaagcactatctagcatctttctatatatttcttgtgtataatttaccatgattctcctcctatttaatccatagcattgaattgaactttcgttttattaatcaagctaaattcatcaataatctcttgttcataccttaagttctcttcatatacacttttatttatgtaattctttaactcatcaaatttactgttattgctatgtaaaactgcatctataactgctaagtaaatggctttcttattattgttttctgaaactattccgtaacccaagctttcatctacctttacactacattcagtaactaatatctctcctaaattaaatgttgtattttttacactttcattagctcttaccattactgtagccaagttaggttctttaattatagaaatacttgatgtatcttttatcattgagtatatcttttctagtttctctaagttcatatttatcaatatcttagtactatcaactgtatacaaaatttagcctccttaatctacctttcgtttacttctctttaataatataataaaccacttaagttaagtgaatattagagttgagttaattctaatgaatatcttgtaaattcttttttaacaatgttaagaaaatatattttaaaatatgaattaaacaaataaaaacaaactgtctcaaaatatgataaacttctttttcattgttgaaatgatgaaaatatatttgatttcataaaaaaagagtgcctcatgaactaaaaaactcattttgaggcactctcatcctatacttataatgacttattatatatatcattataagatttaatttgtctattttatattaaaaaatttctttgcattttcttttgtaactctacatacttcttcataacatatccctttttcctgggctatcttatcagcaacaaaagatacttgagaaggattgtttctctttcctctatgtggctctggtgacatatatggtgaatcagtctctatgaataatctttctagaggtatttctcttactacttctctagtttttttattattcttaaaagtaaccgtgcctggaattgatatataacaacccatcttaacatattctctagctaactctacatttccactataacaatgaagtacacatcctatttcaggatttttagtattctttattatctcaaaagtatctccatgtgcatctctatcatgtattattattggaagttttagctcattagctaattcaatttgcttcttaaaccactctttttgttcttctcttggagaataatcataataataatctaatccaatctctccaatagctacaactttttcattctcagttgcaagttttcttagagtttctattgctgtatcatctagttttgatacatcatgtggatgtaccccaactgctgaatatataaagtcgtattttttcgcaagttcaattgctgttatcgacgtctctatatctgctcctggatttacaaccaaatctacacctttatcttttaatgaaccaataagttcatctctatcttcatcaaaactttcatcatttaaatgtgcatgtgagtcaaataacatctttaatctccttactatttaattacctactaacgaacctcgcatccatctttagccccttgtgtaaatggtaaaacatatgggtctccatcatcacctgctgctaatatcataccttgagattctacacctcttaatttaactggttttaagttacataccactgtaacctcttttcctactaaatcctctggcttatagtattcagctattcctgatactatttgtcttgtttctggtccaatcttaacttgtgatactaataatttatttgcttttggatgtttttcacagcttattattttccctactctaagctctattttgtctaaatcatcaatagtaatttcttctttatgctctaaaggtttttcttctactggaggtttcccagagaacattttagttaattcttctatctctttttctacatctaatcttgggaataaaggttcacctttaaatacttttacattttctccaataagaccaaatgtttttgtactttcccatgtagttatatcatcttgaccttttattcctatatgttcatatattttattagcagtctcattcattataggatttattagtgttgcgattattcttatagattcacataaattatataaaactgtgtctaattcatctttcttcgtttcatctttagctagtgcccaaggcatagtttcatctatatatttgttagttcttctaactaatttccatacactctctaatgcttcatggaattgcattttatccatttcagcttcaaagttttctctagttgaaacagcttgttcttttaagtcagcatcaaaatcagttgaaacttttgctgttggtattataccattattgtatttttcaaccatagctacagttctacttattaagtttcctaaatcatttgctaaatcataatttattctcgttacaaaatttctatgagtataacttccatcttgcccaaatgcaaactctcttaataagaagtacttaagtgtgtctattccatatctttctattataggttctggataaaccacattaccttttgatttactcattttatcatcagcaaatagtatccatccatgtccaaatacttgttttggaacttctagacctaaagccattaaaagcgctggccatattattgtatggaatctcactatttctttacctactatttgaacattggcaggccaatattttttaaattcttcatcattatcagtcatataacctaatgctgttatatagttacataaagcatctacccacacataaattacatgtttttcatcaaaaggaacttttataccccagtcaaaagtcgttctagttacgcttaaatcttctaatcctttgtctaaaaagtttgccaccatttcattttttctagcagcaggaaaacagaaactatcatctttaaataactcttttaatctgtcttcatatttagataatctaaagaaataagattcttcttttactaaatatgtttctcttccacagtcagggcatttatttccttctagtaattgagattctgtccagaaactctcacaaggagtacagtatctaccttcatattcacctttatatatatcaccttgctcatatagtttagtaaatatcttttgtattatgtctgtatgtcttttttctgtagttcttataaaatcatcataagatatatccatagtattccataaggcctttatatcttttatcattccatcaagatactctatctctgacattccttgttctatggctttcttttgaattttttcaccatgctcatctgttcctgttaagaactttacatcatatccacagaaacgcttgaatctagctattgtatctgcagctactgttgaataagtatgtcctatgtgtaatcctccacttggatagtatattggtgttgttacataaaaactcggtttgctcatgttatttacctcctaattttttatcgttcgtaatcatatgattctttcatttaaataataaaaaatcgcctcctatgagttaacataggggcgagattattcacggtaccaccctaattcatctataatagttatgtttcacatgaaatgtagaaacattttatagataccttagtagactataacgtgtccaaccgttttaccctagcacacttgctcagataaaaagctccaagaccatcttcaataaagcttttgacactagctttcacctaacctagctctctgatagaaaaaacctttatttactcttcttttcatagcttgtaatttgtattactatttgtttctatataatcactatattataaaatttttcccatattgtcaacaaattatacaaatattacatagcaaataaaaacagctgctatgacacctgcaacatggctaatcatagcacatgataatgtatgtctagtattttttatcttcagacttccatagtatattgccattgtgtaaaaaatagtctcagaagaacctacaatcgtagcacccattttttctactaaacttcctattccaactctatttgcaagttcactgtacatccctaaagcaccacttccagataaaggttttacacttattagacctattaattcttttggtatactcatcatatttgctattggtgtaaatagccattctaacatatcaagacctttaccagttttgaatattcctattgccaaaaatatacctattatatatggtaggatatcccatgctgcttttaatccatcaattgctccttttacaaaactatcatacacatctatttttttatatttaccataaactactatgtacagaattattattggtataagtaagtttgaaaatatctccatgtatctacatcccctttatctatatcttctttgaaaaaatttacatgttattattgctactgctgtagatattatggttgcaaataaagtcgtaaaaattatttcacttggattttgagcccccatatccatccttaatttgattatagtaaatggaattatttgtatagatgatatattgattaccataaacataatcatatcattagtggctgtatctttcttgttattcaaagtttgaagctcactcattgcttttaaaccaaatgctgttgcaccatttccagcacccaacatatttaaagcaatattcataactatataagacattgctttatgaccctttggaatagaaggaaataatcttctcattataggatttagtttttgacctatcttttcaattaaacctgattcttttgcgatattcattatccccatccagagtgccatgataccagctagacttattgcaaactctataccttttgatgtttcacttaatataactttatttaattcacccatatttttagaaatcaagcttcctattattcctatcgataccatataaaaccatatttttcctattataatcatcctcctctttaaataattttatgatagttaggtaatactttatacttgaaagttgtactatattatgttttagtataagtgtgggagtttttacaatttttaatatttaataataattaaggagagaaataatgagaaatctaacacttcttactgatttatatcagcttactatgttaaatggctattttgaaaagaatattcatgaagacattgttgtatttgatatgttttttagaaaaaacgcttgtgatggagggtatactatagtttgtggtattgatcaggttgttgaatacatagataatcttcatttttcagatgaagatttagagtacttaaaaaacttaaatttattttctgacaagtttttaaaatttttaaaagaatttaaattcacaggagatatatatgctgttgaggaaggaactatcatgttccctaatgagccattaattactgttaaggcacctttatatcaagctcaacttattgaaacagcattgttaacaatagttaattttcagtctcttattgctactaaagcctctagagtttgctttgcagctcaaggagaccctgtatttgaatttggattacgtcgtgcacaaggtccagatgcagggatatatggagctagggctgctgtagttggtggttgtgctggaactgcaaacgtactagcagggaaaatgtttgatatacctataattggtacacaagctcacagttgggtacaaaaatttgataatgaacttgaagcattccaagcatatgctgatgtttatccagataaatgcctactacttgtagatacttatgatgtattaaacagtggagttcctaatgcaataaaagtattcaaaaatatttctgaaaaaggatacaaacctatgggtataagacttgactctggagatttagcttatttatctaaagaagctaaaaaacaattagataacgctggcttttcagatatcagcatcactgcatctaatgacctagacgaatataccataacatcacttaaagcagaaggagctactataaattcatggggagtaggtacaaagctcattacatctttcgattcaccttctcttggaggagtttataaattagctgcatcttgtgaaaaaggagttcttgaacctaagataaagatttctgagaatccagaaaaaataaataatcctggttacaagaaagttataagaatatataacgaagacaataaggcagaggcagatttgattatgttacatgatgaagttatagatgagtctaaacctttagaaatcttccatcctacttatacatggaaaacaaaggtatttacaaattacaaagttaaagagcttcttaaaccattgtatataaaaggcagatgcaaatataataaaaaagctgttcttgaaataaaaaatcatgtacaatatgaattaagtactatctgggaacaatacaaaagactttcaaaaccacacatttataaggttgatttatctagaaatctttggtatttaaaaacacaaatgatagattctaaaaaagttttatagtattaattatttttatttaagggggactgtttatttatggatgttacagattacagaatcatagaaattttacaggatgatgggagaatttctatgaaggacttaggaaaaatagttggtttaacttctcctgcagtttcagaaagagtcaaaagattagaagagtctggtgttatagaaggatataaagctattgtcaacccagattcattaggcagagttataaaggcatttattcatatttctcttccaagcaatggatatacagaatttattgagtcagctgcaaaggaccctaggattgtagaatgtcaccatataacaggtgatgattgcttacttttaaaagtaattgtaaaagatatgtacgagctagaaaatgtgattgatactataaagaaaattggttctactaagacctctgttatactatcaacgccaatacaagcaaaatcaatattgtaatataaattaaatactaatggtttattaattaatagaccattaagtatccttaataaaatttcaatttttgatataaaaaaagttgtctttcataattttacaacaaagacaacttcttttatgtttttgaaatccgtatatttcaaacttcaattaatcatctaaaactcaattatattaactaaatttatacatgtgtataattactcttatacaagtaatttgttaaaatatattccatatatgtctttaacacactgacttctccactcttgcccaataattttactgtagacactatatctgcatacccaagcattattacacctatagtgtcctcatctactaagttaaatacattaattaattctttcctactcaaatcatttttcttatatagagacaaaagtatcatatgatatcttacatatttacttataagtctatatgtctctgttgataactctaactttattcccatattgtcaattatttgagcacctattttttcatgatttgtgaaatgaactcttccggtttcatctaaggtcatactatcaggcttacctatatcatgtaaaaatgttcccaactttaatacatgtaacttatttattccttcttcaatatatgtgtttaaatagtttgacacatgttttcttagatgtattggaaaaaaatccttatcatttaatactatttctaattcttttaatgcatttatagaatgttcaaaacaatttactacatgatatttacattcacctacagacttcatacagcttattttaggaattattttttctaattcatgcttattatctaattctataaatattttatgtgtatcttccctctttaaactctctattataattttccctatttccataaaatcacctcagattcaggttttataaatctaaaacttgtttataaaccacatctttctttaactttctatctttacaaactatttttattgcatcttttttgttcataccactttcaattagttttaaaacatattccctatctgtaagcccatcataattttctttctttgacttctcaccatgaaaaccctctactattaatacaaactctcctcttacttctttttcctcaaatatttttatggtagtttctatattttctcttattatttcttgatatttttttgtaagttctctatttatagaaatattcctattaccaagaattttaagcatatcttttagtgtatccttcaatctatgtggtgattcatagaaaattatagttctactttcttcctttaattcttccaattgtgctttcctaacttttttatctctatctaaaaagccctcaaaaacaaatctatgtgtgtccataccagagccaactaaagccgttacaaaggctgttgcacctggcaatacttctatctctatgttattttgtatagcttgttttattatctcttctcctgggtcagatataccaggcatacctgcatcacttatcagagctatattttcaccatcaattagtttatttatcaaataatctccctttgaatccttattatgttcatgataactagttagtggttttgagatttcaaaatgatttaaaagttttatactatgtcttgtatcttctgctgcaatcaagtctacttcttttaatgttcttaaagttctatatgttatatcttctaggtttcctattggtgttggacatatgtacaatttcccactcatttacaactctcctatatctttattattatatattgcttttaattcttttgtataattcccatcttctccataaacatacaatgggtccaatattttaagctctggtcttccatcttttacaaattgaaccaaaactaagttcggtgctttttgaggtcttggatgcacaaattgaataacctttggttctaatttatattttctccctaaagttattatatcaaccaatcttgttggtctatgtatcatgaagaattttcctctaggcataaccaatctggatgaagctctaattacatcttccaaattgcaccttacttcatgtcttgatattgcttttttatcatttggattttttattccatcaatatgcatatatggaggatttgatgtgactacatggtaaccatttatgtctaagactttgtctatgtattttatatcttcatttataatctcaactctttcttctaatccatttaattttatagaacgagttgccatttcatatacatcttcttgtatttccacgccaataatttttttagcttcactttttccagctatcaaaataggtataattccagttccagtacccaaatctactactttggcatctttttttattttagtaaaattggctaataaaactgcatctataccaaaacaaaaaccattagtatcttgtataattttaaggccttttaattgtaaatcatctattctttctgaatcttttaattgcatatataaattctcctcaaatattaataactttaagcattaattgctttaaaaaaggtaggaaaagccctaccttaaatttaatcttctaatttctttagctctcttagtgtggcttcatctaatccatcattatccttacatttaccaccacagccatcacattttttaggctctctaagtatttttatatcttctcttgtgtatatctttactgtcttgtcttgaaattccactttaatttgttctaataaaggattcacttctacaacttttccttttccatcatctgattgcaccaatgcacctacaacaggcattttttctattgcttcactatatacatcatgctcatattttaagcaacagaataatctcccacatattccagatatttttgttggatttagagatagactttggtcttttgccatttttattgaaactggttgaaaatcacctaaccaagatgaacaacaaagttttctaccacaaggccctagacctcctatagatttagcttcatctctgacacctatttgtctaagttctattctagttttaaatatagcagctaagtcttttaccaattctctaaaatctattcttccttctgctgtaaagtaaaaaatcaacttattcctatcaaacgtatactcacaatctattaaaaacattgttaactcatgttcttttattttttgttggcacaactcaaaagtttcttttgccttttccttattttctagatatacttttttatcttcttctgtagctattcttataattggcttcaaaggagaaactaattcgctttcatccatatcttttggaccaacgactactttcccatactccaagcctcttgcagtttctacaactacatccatatcttgctctatattaaaatcaacagggtcaaaataatatattttcccagcacttttaaaccttatacctactatctttatcatttaatcacctcgtatatatttaaagacataacttgtatgcttatattgaaattgcaattgctttttattttactctttgcatcttctattatatcaataatcttggacaattgagaataactaatttttccactcatattttgaatgaaaactagcttatctacatttattaacatgttcttgtttacattttcttttaataggatgatatctcgaaaatagtttatcatcatatctaataaagctataatcttacctctatatttttccatattgtttggtatatttaaaatctccactatgtttttatctaacattatctgaatatactgttgtatatcttctctcatcattgaaaactcagaagactgagatagatttagagcattctcaatacttcctctcgaaaaaatagccaataattgagctctttcttcttctatacctgtatttatcaaataacgttttaagtcttcaattggtataggtgagaactttattatatcacatctagattttatagtttctaataaagattccttgttgtttgtgactaagattattatagcatagtttggaggttcctctagcgtctttaaaagtgcattttgagcttccacagtcattttttcagcattattgattatatatattttatagtctttatgaggtcttattactatatctgattgtaaatttctgatttgagctatttttatactatttccatctggttttatgagtacatagtctggactattttcgagattttcataatcaagtaatagttttgataattcatctgcaaatttcttttttcctattccatccattccttcaaacatatacgcattattaagtttatttttctttatagaatttgttaaatatttctttgcaaaatcttgccctataatattttcaaaatacatatttatctctccataggttttattgaatcaagaactattttataaatttcattatgtatactttcaatacttcttaatttgttatctaaaacacaatttatttttttccaatcatatttatctgctatatataaagcattgttgtaagatttctctaaatactctatgtcactttcatgaatatcctttttttcttcccctgtaattttattttttctattctccataagctttttactaaattcaataggcacatctaaaaatataacacaatcaggttgtggtatcttaaataaattaaattcataatcagctaaccaatttaaatactcttctctatcacaaatatccattttagaggcctgatgtaccatattagaggttgtatatctatctgcgataattattccaccttcattgtaaaactcctcccaatcggttttaaatgatgcatacctatcagctgtaaaaaaagttgatgctatatatgggtctacatctgatgcatttttaccaaagtctccttttaggtacattttcactaaggcagatgatggagattcataatttggatattctacctttttaatcatatagccttctttttttaatctttcatataatatttctgtctgagtagcctttccacttgcatctgaaccactctctataattattaacttacctttcattttcatatcctccatacaaacactttttacttttttagtacttttattagatagctctatataagcagtctatttatttctcttcacaattttaaactatctacttctatctacttttatatcataatttttaaatgtcttctaaatctattacttgtataaaatttaaatctacatctttcaatccactcacaatcatgcctttagaatgacaaaacattagatagtctattatttctttacttattacttcaccaggagatattacacttattccaggtgggtatggaactatacattcaccacaaattttacctatgctgtcatatattttaacactttttttagttttataaaatgcttctctaggtgttaatattttctttggaataacaacagggtattttttattttctaacttttcaaatttaaagtcttcctttacaacattgtttaatgctgtttctaaactagagaaatcctcagcagtatttcctattgtacatattaaaagaactccataataattagataactccacttgtatgttatatttgtttctcaaaatattttctagttcataacctgttaaacccatgtttttagatgatataaatatttttgttttatcatttgtgtcatatatattaatatttgaatcaactttatctttgaaaattctaatattatttaaaagctcttccattaattcttttcctttattttcatatatatctactgctaattccagagaagataataataaatatgaagggcttgaagattctgtaattcttaacatgttcaatattttatctatatcaactcggtctccctgtatatgtatcattgacgattgtgtaaatgctggaagagttttatgtgtactctgtacaactatatctgcaccttgctcaagagctgttttaggaagcctctcactaagccctaaatgcgcaccatgtgcttcatctactatcactaccatctttttgctatgtgcataattacatatgtattctaaatcatatgtcattccataatatgtaggataagtaagcagtactgcttttgcatccaagtttttatctattatatcaatcacattacttatagatatcccttttaagacatttgtctcttcacttatctcacaaggcacatactctatatctatatctcctaaaatacatccatttataacagactgatgacagtctctatttgttattattttacttttaggactacatactgacattattgcagattgtattccacagctactaccatttactaaatagcaagtataatcacttttaaatactcttgatgcttttttttgtgaattttttataattccttccggaaagtgtaaattatctgttcctaatatctcagttgtatccattttatacaaattttttagtatatctttatatcctaactttttataaacctgtccctttttatgaccaggcatatgaaaagatattacttcttcatttacaatcttatttaattcattaataataaacatatattaatagtactccttttttacataatacttctttttaaaacttcaattcttatctattttaccattaaaaaagaaacaaattaatatttttataaaattaaatacctcattctaaacatttagaatgaggtatttaacataaaagcataaattattctctatcatcagacattaaacttggtattaagtataatccagctaaacctacaatgaagtatattattctacttaccatttcatatgttccaccaaagatactacctattaagtctgtacctagaataccaattgcaccccagttaagcgcacctattatagctaaaattaaagcaacttttttcacttatatcactcctcaagaattaaatttttataaagtccataattcctgtgtttagttttcccgaaatgaaaaaataaatacgtattttttgttttttttgacaaaaaataaaaaaaattacgtggctacgtcctactctcccaggcagtttcccaccaagtaccatcagcgctagagagcttaacttctgtgttcggaatgggaacaggtgtatcctctctgctattgtaaccacataatctttatgcttaatatttctattaagtttttaataagtttatagaacctagtaatactagtttctttagagttagcactctaaaaactacacatatatcttaatgaatgaacatcaaataaatattggtcaagtcctcgacctattagtatcgataagctaaatacattgctgcacttacaccttcgacctatcaaccagatagtctttctggggtcttacccttgcggtgggaaatcttatcttgaagttggcttcgcgcttagatgctttcagcgcttatccattccgtacatagctacccagccatgcccttggcagaacaactggtacaccagaggtacgtccatcccggtcctctcgtactaaggacaggtcttctcaaatttcctacgcctgcgacggatagggaccgaactgtctcacgacgttctgaacccagctcgcgtaccactttaatgggcgaacagcccaacccttgggacctactacagccccaggatgtgatgagccgacatcgaggtgccaaacctccccgtcgatgtggactcttgggggagataagcctgttatccccagggtagcttttatccgttgagcgatggcccttccacgcagaaccaccggatcactaagtccgattttcatccttgctcgacctgtatgtcttgcaatcaagctctcttttgcctttacactctacgtacgatttccgaccgtactgagagaacctttgagcgcctccgttaccttttgggaggcgaccgccccagtcaaactgcccacctgacagtgtcccaagaccagattcatggcctatggttagagtcccagtactacaagggtggtatcccaaggatggctccgccaaaactggcgtcctggtttcaaagcctcccacctatcctgtacatgtagtaccaagacccaatgtcaagctacagtaaagctccatggggtctttccgtcctgtcgcaggtatccggcatcttcaccggaattacaatttcaccgagtctgttgttgagacagtgcccaaatcgttacgcctttcgtgcgggtcggaacttacccgacaaggaatttcgctaccttaggaccgttatagttacggccgccgtttactggggcttaagttcactgcttcgattgctctaacagatccccttaaccttccagcaccgggcaggcgtcagctcctatacatcgtcttgcgacttagcagaaacctatgtttttggtaaacagtcgcttgggcctattctctgcggccacctgatggtggcaccccttatccctaagttacggggtcattttgccgagttccttaacaacagttctctcgctggccttaggatactctcctcacccacctgtgtcggtttgcggtacgggtacctttaacctcgatagagacttttcttgacagtgtgaaatcagctacttcgctactaaatttcgctccccatcacatcccagcattatcaaagcggatttgcctactttgactgcctcaatgcttgggcacacataaccaacagtgtgcttagcttatcctactgtgtcatcccttctctcaaacggttatcggtagtacaggaatatcaacctgttgtccatcacctacgcctttcggcctcagcttaggtcccgactaacccagggcggacgaaccttcccctggaaaccttgggtttacggcctgtgggattctcacccacatctcgctactcatgccaacattctcactcccatactgtccacatgtccttacggtcatgcttcaacccgtatgggaagctcccctacccatcattactgatgccgtagcttcggtagtaagttttagccccggaaatcttcggcgcaggatcactcgaccagtgagctattacgcactctttgaatgagtggctgcttctaagccaacatcctggttgtctgtgcaatcccacatcctttaccacttaacttacatttagggaccttagctgacgatctgggctgttgccctttcgactatgaatcttatcacccacagtctgactcccaagtataagatgacggcattcggagtttgatagtcttcggtaggtgcaataccccctaggacattcagtgctctacctccgtatctctcaccttgaggctagccctaaagctatttcggggagaaccagctatctccgggctcgattggaatttcaccgctacccacaagtcatccccgagcttttcaacgctcgtgggttcggacctccacgaaattttactttcgcttcatcctgctcatgggtaggtcgcccggtttcgggtctacgtcaagtaactgaacgctcagttaaaactcgctttcgctacggctccgcaccttaagtgcttaaccttgctacttaacgtaactcgttggcccgttctacaaaaagtacgcggtcacacaagaaatgtgcttccacagcttgtaagtgcagggtttcaggttctatttcactcccctcccggggttcttttcacctttccctcacggtactatacgctatcggtcactaggtagtatttagccttggagggtggtccctcctgcttcccacagggtttcacgtgtcccgtggtactctggatcatatctgaagtcttctcgtttaacatacaggactattaccttctgtggtgggtctttccaaacctcttcaattacgatacctcttcgttatgatatgtccgcaaccccaataaagaaaactttattggtttgggctaatccgcgttcgctcgccgctacttacggaatcgaatttctttctcttccttcaggtacttagatgtttcagttccctgagttcccctcattaagctatgtattcacttaatgatacttagacattactctaagtgagtttcctcattcggaaatcttcggatcaaagtttacgtgcaactccccgaagcttatcgcagcttatcacgtccttcatcggctcctagtgccaaggcatccgccctgcacccttaataacttgaccagttaaaaaggtttgatagattagaagctatcaacttcgataattttaaaaagttatcagctttatatattacaaattagatgtcatatcactaaatatatatgcagttttcaaagtgctaaagcacggcgccaacggataaatcccgttgctaaaagtgctaattttgagtattcgtaaaaacgaaccctcaaaattaaacagtaggtaattctccttagaaaggaggtgatccagccgcaccttccgatacggctaccttgttacgacttcaccccagttattgattccaccttcgacgacttcttccaaaaggttagataatcggcttcgggcgtctccaactcccgtggtgtgacgggcggtgtgtacaagacccgggaacgcattcaccgcagcattctgatctgcgattactagtaactccagcttcatgtaggcgagtttcagcctacaatccgaactgagagtagctttaagggattagctccaccttacggcttggcaaccctctgtactacccattgtagcacgtgtgtagccctaagcataaggggcatgatgatttgacgtcatccccaccttcctccaggttatccctggcagtctctctagagtgcccaacttaatgatggcaactaaagacaagggttgcgctcgttgcgggacttaacccaacatctcacgacacgagctgacgacaaccatgcaccacctgtcaccaatgtccccgaagggaactctccgattaaggagatgtcattgggatgtcaagcttaggtaaggttcttcgcgttgcttcgaattaaaccacatgctccgctacttgtgcgggtccccgtcaattcctttgagtttcactcttgcgagcgtacttcccaggcggagtacttaatgcgttagctgcggcaccgaagggggtaacccccgacacctagtactcatcgtttacagcgtggactaccagggtatctaatcctgtttgctccccacgctttcgtgcctcagcgtcagttacagtccagagagccgccttcgcaactggtgttcctcctaatatctacgcatttcaccgctacactaggaattccactctcctctcctgcactcaagtctcccagtttcaagagcttactacggttgagccgtagcctttcactcctgacttgaaagaccgcctacgcaccctttacgcccagtaaatccggataacgctagccccctacgtattaccgcggctgctggcacgtagttagccggggcttcctcctcaagtaccgtcattatcttccttgaggacagagttttacgacccgaaggccttcatcactcacgcggcgttgctgcatcaggctttcgcccattgtgcaatattccccactgctgcctcccgtaggagtttggaccgtgtctcagttccaatgtggccgatcaccctctcaggtcggctactgatcgtcgccttggtaagccgttaccttaccaactagctaatcagacgcgggtccatcctgtactggctcacctttgatattcaagagatgcctctcaaatatattatcccgtattagcatacctttcggtatgttatccgtgtgtacagggtaggttacccacgcgttactcacccgtccgccgctctttaccgaagtaaatcgctcaacttgcatgtgttaggcacgccgccagcgttcatcctgagccaggatcaaactctcaaataaaagtttatcaggctcagatactattgttatcaaaatatctggctttatggtttgtttcttgttttataaattaacctactgtttaattttcaaagttcattttttatgtttgcccttttcttaaggacaagtaatactatatcatcttaaaaatatttcgtcaatactttttttgttttttattttaaaaaaggttataacttttggtttttttaataaatataattaaaactaatagatataacccttgatattacaaacaatacatgcatatataattttacctattttgcaattttattttcataagaatatgaattagctctcactctatctgcccaaatatttatactcttaactttattaacattagttgtaccctcaaaaatatccattgcatccttacaaaaatatatcataacatcaagaaccaaaaatccaacacaaaataaacataaaaaattaattacttgaaacatcagacattcccccaataattttttatatatagtattctcataaattattctttttaccttctcataaattattctaaatattttcataataaattactttcaatcatattttctaaatataaagtctcaatcaacaaaaactaatatcaatttctaacgtttgttggtaatttataaattaaatatctaaaagaatctttgaagcatataaaaagcattctacactgacattttaaacaaaatttagctatttattgctaatttaatagctaaactttatttaaaacttagtagaatgctaatatttcttagttttcttcttctttatttggattgttatcaataggtttcatagtcgggaataataatacatctcttatagatggagagttagttaataacataattactctatctatacctattcctagtcctcctgtaggaggtagacctacctctaatgcttttaagaaatcttcatccatttcaaaagcttcatcatcacctaattctctttttctcaattggtctataaatcttcctttttggtcaatagggtcattaagttcagaaaatgcattagctaactcccacttattagcaaatgcctcaaatctatcagttcttcttgggtcttcaacatttctcttagataatggagatacttcaactggatgatgagttataaatgttggttggattaatttatcttctccaaattcttcaaagaaagcatttattacttctcctcttctcattccaggttttatctctatacctttttctctagcaacttctagtgcctcttcatctgtatttatagtagaaaaatctacaccagaatattctttaacacaatcttccatactcattcttttccaaggtggtgtaaagtttatttctgttccttgatagttaactatcatacttcctgtagcaacttcagccatatgtgcaataacattttctgttatttccatcatatcagtatagtctgcatatgcttgatataattctattgcagtatattcaggattatgttttaaatccataccttcatttctaaacattcttcccatttcataaactttatcaaatccaccaacaataagtctttttaaatacaattcatttgctattcttaaatacattggtatatgtaaagtattatgattagttataaatggtctagcatttgccccacctgctatagtatttaatattggagtctcaacttctaaaaatcctctatcatctaagtatgctcttaatgcttttaatgcttttgttctaattaaaaaagcattttttacttctggatttactattaagtcaacatatctttgtctatatcttagttcttggtcttttaatccatgatatttttctggtaaaacttgtaaagatttacatagtaatactacagatttagcctttacagatatttcaccttttttagttttaaagatttctccttcaattccaactatatctccaatatcatatgttgaaaatacactatattcttcctctcctatagcatctagtcttacataagattggattcttccctcttggtcttgaatatctataaagccagctttcccttgtattctcttgctcattatacgtcctgctatttttgtagttttaccttcaagagaatcaaagttatcttttatatccatagaataatgagttctatcatatctactttctttaaaaggatctctacctgactcttgtaatttttttagtttatctcttcttacttgaagtacttcactaaggtcttcttgaatttgcgcttcttcattgctttgttgattatttttcatttttttcctccaaattatcttcttatttctaatatttcaaacttagcaactccatcaggaacttgcacttccacaacttctttcgcagctctacctaaaagtgctttccctacaggagattcgtttgatattttaccatcatatgggtctgcttctgtcgaaccaactatagtatattcaacctcttcatcaaattctaaatccttaactttaactattgatcctattgtaacaacattaaggtctattttgctttcatctatgataacagcttttctaaccatattttctaattttaaaattctttcttcaacttgtgcttgttcctttttagcttcatcatactcagcattttcagataaatcaccaaaagatatagcaacttttattctctctgcaacttcttttctctttacaacctttaagttttctaattcttcttctaatttatcatatccctcttgtgtcaataaaaactctttattttcttccattataaatacaactccttcacaaatttcttaggaattttcctaattatattttaaaaattttataatctttttttaatttatgcgctatattataagtcactattatttttatgtcaaggagtcttccatatagtactccaatttcgacacaacttcttgatagtcttctattttgttaatttcatcccttaattttgcagagtttctaagtccttttaaataccaagcgatgtgttttctcatttcccttacagctacatactctccatgttcttctactgcaagttttaaatgcttaatggcagtacttattttttcgttaagagttggctctggcaaaatctcgcctgtattcatataatggtttattcttttaaatatccaagggttaccttgagcacccctacctatcattatagcatcacaaccagttttgtctaacatatttattgaatcttctattgtaaatacatcaccatttcctataacaggtatactcaaatttttcttaatctctgcaattatatcccagtctgctttgcctgtataaaactgttctctagttcttccatgtattgctaaagcgcttattccacaatcctctgctatctttgctatttcaacagcatttacactattatcatcccagccttttcgaatctttaaagtcactggcttttttgagttcttcactactgccctcaatacctcttctgcaagcttaggatttttcataagtgctgaaccatctccatttttaactacttttggagctggacaccccatatttatatcgagaatctcatttgaataatcattcattatctctgctgctcttcccataaactctggttctgaaccgaatatctgaactgctacaggatgttcttcctcttctatcttaagcatttttttagtattttcatcatcatagcaaagtgccttaccatttatcatttctgtatataaaagcccacatccctgttctttacaaattaatctaaatggaaggtctgttacacctgccataggtgatagaaaaactttatttttcaattctaaatttcctattttcattgtttttctcctatttttgcctttattttgtgatttaactttaaattcttatttcctcattataatataccacatatagctagaaatctatcataaaaagggaattggatatataacccaattccctgtatattaattattcttggtttttttcatatattattctcaatccttctagtgttaaaaaaccatctacataatctatacttttcgtctctgaagcaatcagtttagctaatccacctgtagctataaccttaacatcatcacaattcaattctttcttcatcatacttattattttgtcaactaaaccaacatatccataaattattccagattgcatggctgatacagtactcttacaaatagtcatacctggcttagctaattctactctaggtaatttagacgcactttgaaataacgcctcactagatatttttattcctggtgctattgttccacccaaatattcacctttttcagagatagcacaaaatgtagttgctgttccaaaatcaacaagtatacttggtgctccatacttttctatccctgctacagcattaactattctatctgccccaacttgttttggattatcatattttatatttagacctgtttttatgcctggacctactattaatggctgttttttacagtactttatacaaaagttttcaagagaatgcatgacatttggaactacagatgatattataacatcatcaatatcacttatattcacattatcataatcaaataggttacttatcaggattccatattcatcagacgttttttccctatctgttttaattctccagtaattaactaatttgtcacctttatatatacctaaaaccatattagtatttccaacatcaaatactagaagcatatgtcattaaccttctttctattttttgcttttcttaagtacagtggcaacagcagctactactaaagcccctactattgcttctggcaccccatttgctgcggcaagagccattattacttttcctgctgaaccacttttacccattgcatgaagatacttgtcagcatataagacatatatcattcctaaaactccagctgtatttaacagagaacctattgcccctgtaattaaacctgatatgtataccttatttgtagccttaattattaactgatatacataataagctaatacacctatcataactcttggtaatattgaaactaatggatttataaaaacaaaagatgttactgttgggtttgttatagcatttaagagacttgatatcccaaatataaatcctattgctgccccaactattggtccttccataatagctccaataataactggtatgtgcattatagttgcttttgtaggtccaactggaataaatcccaatggagtcatagatagcataatagaaatagctgatagtactcctattatagtcatctttcttacatttacttttcttactgatgcacttgtgttcatcataaaaaatacacctccgttccagctcattaagatgccggactacttaattttttaatttttttcgtttttttcttataactatgagtcaagctaccattgtaggatgcccgctctaacaagaataattttatcaagatgagttgccattgtcaacaatttgacaagaaaaatatgctaatttcatcatatttctcgtttttttactatatctttatatgccattatattttctacactatccgctttttttactgcatttattatacttttttccacaacctctacagccaatgaacctactaatgttatatctgcttctatttctcctgttgatattgtgaatattgtatctccatcatgaggtgtatggataggaaaaatagacttagcatatccatcatgtcccatttgagatatctttttacatccagctttggttaacttagcatttgttgcaattatcccaattgtagtattatctacactaaatccacctttactttcaccttgtttcattaatttatatgtatcaattgtttctgtctttttatcatttaaagcaccagctataaccttaccattttcataaacatctccaagagcatttacagcaattaatgcagatacaattagaccattatctaattttatagaatagctacctattccgcctttcatagcatattcctgacctcttatttttccaacagtggctccacaacctgctccataatttccttgatttaaaatatcagtatttgcaacttcacaagctctataacccatctttaaatctggtctacatttaaagctccctactcctaaatcaaataaaactgctcctacaactataggcactttacctacacctacatcaaagccaattcctttttcttctaagtatctacttacaccacaagtggattcaagaccatatgcagaacctccagccaaaactactgcatgaactttttgaaccatatttacagggtctaataaatcggtttctctagtccctggagcagaaccccttacatcaacaccgcaagtagctccttcttcacatattactactgtgcacccagtaagaccatttctatcctcaacctgcccaacctttaagccttctatatccaaaatattattatacatatcctttttctcctcttatagaaacttcacctgaaataatttcttttatacttccatcacttctttgaactaataaatttccctcttcatttatgtctaaacatttcactagttctctattatctccttttaatacatatatatttttatctataattgcagaataatctctacatatttttaaggttttttctttggaattatttacagtataatctaaatataatttttcaaattcagtcaatacattcctaacaatatctactctggataacatatacccttctttatacaatgatgtggctttgtcagctatttcttgttcaaaatccattattttaacatttattccaattccaagaacaacataatttgttctttcaatttcagcagataactctgttaatataccacatattttttttccatttaaaataacatcatttggccattttattaatgtatttgctcctagattgtttaaagctttcgttacacttgctcctgctattaaagttataaatggagctttgaatggttccatatctggttttaatataatactcatccagattccttcatgagtttttgaatcccatcttcttcccaatcgtcctttccccatatcttgatgttcacttaaaatcacagtcccatctacactatttatagctatccttttagcatgttcatttgttgaatctatagtgtcaagatgttcaatattttttccaataaactctgtatctaatttatagtaaatattctgtgggcttaataaatcagttggattttccgctaatcgatacccttttttatttacagattctatattatatccctcttcttttaaggctttcatatgtttccatatagctgcacgtgacacccctaattgttttgataattcttctcctgaaataaattcagatttattatttaatataatctctattattttatctcgcatatttcacctctaatatgacataatttcatgacttattttcttctaataaataattatacattattaatatacttttaatactattaattttaaatttcctttttaattattataatggttgttttatattttatattgatgatttatataattttacattttatttaaataattttaaaataataaaaaactgaaagtatcaattaaattaatacatgcaaatataatttgcttattaatttaatattatactttcagttttagtatttaatccacatcagataataatcttaaaatgaccaaggtcttaaaactatttatctttatcagatttatcttctaaatttttatttatatcaataacattgtttctttcttcttcatctttttctaattttatagttaattgttcttcaacttctttagaagaattttcctctgtaactgcattttcaatttcattcagaggtaactctttattaaatgcttttacaaattgttctgcatctaaagtttcatatataagtaaagcttgtgctacatactctaatctatccatattttcttgtaatatacttcttgtcttatcatatgcaccatcaactatacgctttgtttcttggtctatctcaaaagcaacttcttcagagtaatttctcttacttgaaaaactattacctaggaatacttcatcatcactgtcaaatgacattggaccaagtttagaactcattccatactttgttaccatacttcttgcagtagctgtaactctttctaagtcatttgaagcacctgtagatacatccttaagtactagctcttctgctactctaccaccaagtaaaactacaatattttctttcatttcattttttgtagcatagaacttatcttcaacaggaagttgcattgtaaaccctccagctcttcctcttggaactattgtaacttgatgaacaggacttacttcttcaagtacatgggcacaaactgcatgccctccttcatggtatgctgtaagtcttctttctttctcacttattactttcgattttttagccacacctgctataacctttgttatagcttcttctatagtttccatcttaattttcttttctctttttctagctgttaatattgcagcctcattcattaagttctctatatcagcaggagtaaatcctggtgttcttctagccaagacatccatttttacatcatcacttaatggtttatttcttgagtgaactttaaatatagcctctctaccttttacatctggtgtaccaacaacaacttgtctgtcaaatcttcctggtctaagtaaagctgggtcaagtatatctggtctatttgtagctgccatgattattataccttgatttaccccaaatccatccatttcaactagaagttgattaagagtttgctctctttcatcatgacctccaccaagacctgcacctctttttctaccaactgcatcaatttcatctatgaatatgatagctggagcacttttcttagcctgttcaaataaatctcttactcttgaagcaccaaccccaacaaacatctcaacgaaatcagaaccacttatactgaaaaagggaactcctgcttctcctgcaactgctcttgatagatatgttttaccagttccaggaggtcctaccataagcattccttttggtattcttgcacccaattcaatatatttcttaggattctttaagaaatctactacctcctgcaaatcttctttttcctcatctagtccagctacatctttaaatgtaactctagttttttcatcatctttatgaaccttagcttttgatttgccaaaactcataacctttccgcctccaccttgagactgattcataaacacgaaccaaataatcaccatgaagaatattaacagtaatgtaggcaacatttcgacaaaccaaggtgtagatggcttagcttcaccaccaaaagttagtttcccagccttagcttggtctaacacctcatctgcaagtttatttcccatcacttctgttggaacatatgacttaaactttgtatttgtatcttttatagtaccttctacagaagtttgatttacaaagtataatcttgatatattctcatctgttaattctctatatacttcagagaattttaaatcttttattttttctgtaggcttacctgagaattgaactatacctactataattataaaaacaagtagataaaaacctgccccttttagcaacttattcaatatagaagccctcctttcatacattgctttgccctataatttgttaaaattaatttttaatacttcttttgtgttttcatcaattttataattttcactgattttataatctccaacacatattattccttcactatctgtgattataggaattttacatctttcttctcttgggatttttaaatctatgaataaatctttcacttttttacttcccatagcaagctttatcttatcaccttgccttctgcttcttattactatacccccttttaccttattaaaatcaaaccctttagatgaattgtctaatttcatactcttatacctatctatgctcattacttgggtctcaataatttgttttaattcttttattttaataaacccattactaggtacattgtaataaaattcaatttcctcattaacaatttcctcattcgttaatattatactgtctttttttctataaacaaatatatttcttggaagagttaacattttatttacttttgaattatcttctaaagacattatatcttctatatgtctttggtcaacaaaattagtatctcctagtatatgttttatggaatttctaagaactctaactttgatagcatcatgtaagcaaacaaaatcgtctaaatttatctctacaaagcctttttcttttatatttgaaacttctctaaatttagcttctgcctctttctcaatataatcgttatcactttttaaactattgctcatcctcactatagattctattacatttgaattaaaattatccttcatatatggtaaaaggtctaaccttatcttatttctagtgtatatattttctaaatttgttttatctatcctcggatttaaattataagcttcacaatactcctctatctcatttctttccacgtctaatatgggtctaattatgcaattatctctaatataatcaattccctttaagccttttaagcctgttcctctcatgatacgcatcataacagtttcggcttggtcattgagattatgacctattgctattttattggctttaatcttatccttaatttcataaaacatttcatatcttagcttccttgctccttcttctaatgataatccctcattttcacaatattttggtacattaatagactttacaaagaatataattcccatatcctcacaaagtttagatacatataatgcatctttttgagcttctatccctcttatttgatggtttaaatgtgctgcatatatttctatattaaaatctttttttaatctatttagtacatgcaataaacaaactgaatcaggtcctccagaaagacctaaaactattttatcgcctttttgtattaaattatgtttatttatagtacttagtaccttatcaaatatcatatttatccctcttacacttagttttattcacttttaagtatactttctataaaaaaacgctaaacccttgtatcaattttaagaaattaaagtttaatataaatataataataccaaataaattaaataaaaggtagttttttcactacctttataaaatttctggaaaatagccatagttattatttagtacctatgtatatatctattttattcctacctaaaaataaatcttgtacctttatattatagtctattttcaattttatgtgttccccttcttgtatatttatatctaattctcttgtatcaatatcaattaataaagtaccttgtggggtcacatactttgtagtactactttctccacatttaaacagcattgttgagttaatagcaccaaactttttgatactaacttgatttttaagtatctttatagtattagttatttctatattttcttctttttccttgtaaataacatatattccatcatttttataaaaaattttaccaaaggcagtcatctctatggtgtccatatttcctttttcatcatattgtctagtatttatacttatttttacactcaacgatttttcctccatagattcttcatataaactagtatttttgtatttctactttttgaatcttatcaatttttttctttaagaactctcttgctatatctgaaaatttttcaggtatatctgatacataatattgataagtcccatgaatttctgtattgtttataatattttgcacctctaaaatcttttttaaatcctttgcagtctctttagctggattaacaagttttatatgctctccaacttcttcacctattgttctctttaaaataggataatgagtacatcctaacactaaagaatctatatttttttctttcaattcttgtaaatatatctttgctgtcaatttagccacttctgtatttgcccatccttcttcaacaataggtacaaataaaggacatgctttattaacaatttctatactctcatctattttagatatttccaagttgtatgcttttgaacttatagttccttcagttcctattattcctacaattttgttttttgtagaacttacagctgttctagctcctgcttctataactccaattatcggtatatcatatttttcttgagcttcttttaagcttcttgcagtagcagtgttacatgctataactatagcttttacaccttttgtttttaaaaagtttatagcttgaaaagtatatttaattatagtttctttggatcttgaaccatatggtattctggcagtatctccaaagtatattatatcctcatttggtaatatcttcattatctcttttagaactgttaatccacctaatcccgaatcaaaaactcctattggtttattgttcatctttatacaacacctactttacatttttgtgtttaacaacaacttatttatcgctaaaatttatatttatattcataattaatatattattacctaaatgattattatagtttattttacacaaaaaataaaggagctatcttaaattagaaaataatttctacaaaaagacaactcctttcactacttaaaaatttaaatttattttgcaaacacatgatttcctattctcatataaggattcaatctatttatccatttgcaagtggctatttctggattccaaaaatatactgctttattagttgggtcagttccataaagagcttcctgagctgctttacgtgctgagtctgttggtgccatctttattgaaccatcaagcacaactgagaaagcatttttttgatatatgacttcttctattgtgtctggaaatctagggtccaatactctatttattactacagctgctacagcaacctgtccctcatagctttctcctctagcttctcctgcaaccaacttagataataacatcaagtcattatcagataaatttattacttctttctttgctatatttttttcttgtttgtttactttcttaatattttctgttggttcatatgcaaatacctctttaataggcataaatataaaagtcaaagctaatagtgtagccatcagtttactccacctgtccatgattaaaaccactccttacattcttatttttaaaattttttctctaaatccttgactacttcaagtactttaaacttaatttttactctacttgttttttttggtgtatcttgttttattaacttatattctttatcagttaaaacttccttcaacttatcatctgtagatttatctatcactccattagattcatcaacaaaacatagtggagggaacataacacaccaccagttttttccttcacctttcccaatgataatctttaatgctttatattcaccagctggaagaactatattagaatattgtttagtagggaaattgctatattgtatacctacctttacactgtaattatatccatttttaagaataatatttttacttatttcttccagactactatattccttttttataatagcttcactttcttttatactttttgaattttgaagctttggctgtaaatattttattacttcatctctaacttttagtttaagttcttgatcttcatctgtattgctgtttgctataacatgaaatcttattaatttatctttataatcttttgatatattgtctactttttttacctcaccatttattactattgtcattattgatatgactgatataagacttaatattaatagtcccaatctaatcttaatttttctcattgaaaattccccctcaagataaatttatatcatcaattatgtccaattaaatttaatttattcataatattttttaatactaataaaaaaagctatcttaaaatgattacaatcattttaaaatagctttttaaaccttatattttataagtctttactaatcatagccttatctatcataaactgctctgctttttctatatgctctgtagcatacttcttggatagctcactatcacctttaattatagcatcaagtaagtatttatgctcttcaacaatattatgtgatgtatcataagcagacatataggtaactctaaatctatatacttgttcccataatgagtttattagttggattaattttttattattagttgctttaaatatacattcatgaaattctacatcaagttttaataacgcatctacatcggattccaaagtgctttttttaaattcttctgatatatctttaagctttttaatatcttcatcactaattctttcagcggcaagatatgctgctaagccttctaggcttgctcttacttctaatacatccataatatcctttaatgacatatttgccacatacgcaccttttctaggcaacataacgactaaaccttctaattcaagctttcttattgcctctctcactggagtcctacttactcctaattgttctgctagttgcacttccattagcctttgaccaggctttaattttccttctaagattgcttctcttaaattctcaaagactacatctcttaatggcttgtaattatccaagttcagtttagttaaattctccacaaatttcaacccctttttgactgctattaacaacatacacctgtttatatttttttaataattctttttttccaattagagcatcttctttatttttaaatagtccaaaaactgtaggaccacttccactcatcatagaacctaaagcattatttttcatcattacttgttttatatcacttatttctttgtgtttacctatagtaacattttcaagaatatttaccatgctttctgatacagcttttatatcttcagattttaaacactctatcaaatatttattatttggtctttttttaatattattcaaatctaatccttgataaacttctttagtagaaacgaataagtctggtttgcatatcaatatatttgtatcacatggtaaacctttgatgtttgttagcttttctccaataccttgagctaaggcaggtcttcctgatatacaaaaaggaacatctgcgcccaaattaagtcctatttcttttaattcatcttcagataatctaagttcccataggtgatttaaacctactaatactgcggctgcattagaacttcctccagccatccctgctgctacaggaatatttttttctatgaatatttctacacctttttttatataaaatttatttttaagtattttggcagctttataaacaatattatcttcatctaaaggaatatctaaactagtgctttttacctttatttcatcttcgtctaattcttttatctttactatatcgtataaatctatcgtttgcattatcatttcaacaaaatgataaccgtcttgcctttttcccaagacatcaatggataaatttatttttgctctactctttagtcttataaaatccattctatcctccttgtttaaagaataatgcatcactaacaataatattatactacaaaaaataaaataatagggtattataataccctattatacttaattactttaaattttttaatattaatctactaatacgacttttttttctaaaataagacacttaccaggcttaattggttcatcaagttttatatcattaagttctgcaatttcattttctgttgtattgtatttttttgctatattccagaaagtatctccttctttgcatatatatacgattatgctaggagctttagataaatcatatacaccttggtcttctcctttgataataaaattttctgctttcttatctaatgcttcagtaaatctcttaattttgataatcaagtctatctggtccctattcaaatcaacttcgactttatcaatacatgctgtattaaacacagatgctgtatcagttagattatccatttctatatcatgttcaaatggaatttcctcactaattttataaaccaattttaaaccttcaactgggacaaataaaatttcaacttttatgattccttgtataatgcttttatttccttcaatataactattttctatagacatggttggacaaacgcttacaatatcttttatttgtatatcatcattatcatttcttatgccttctctaaccataaatgtttcttcactacgtcttaaagtcttatttaattgaataggtttgtggtcaaattttattatcttttgaggcgaatatgcatcttgtaatacttctcttgtaacttcatctgtaacttttaccttacaacaagccatacaatctatttctaaaagacctgtgttgctttcactattttgcttgaaaatatgattaaaatctgacatagacaacaatacttcttcagtcataccatcactaactccagggacttctacaaattgagtaaactcaatacctactctatccaactctacaagttcaccctcatatgtacaagctaacggatttatttctaatactccaccaataataactttattgtcagtcactctactttcttttactttaacacatggatttaaacttattatagattgaatttcctctgtgtttattgttatagtatctcttatagaactttctgctttttctattccaactatatcttgaaaacaaatttcctttctgtgcttttgtatgccttccacttgcgccacatcttttacaatgtctaacctttgcttttcaaacaaacttccccttatattcataagagctcctactttaatctttctctcattcattatagtacaatccatatgctctacttctgaaaataacatgtattccatatcttgaacaacattgtctttttctattacttcgtttatatctacttttccgtctacattagaaatagtatttttatcatctgcaatatagattacattataattaaaactacctctgcaaagtatcttcccatctgccatttcaatttttttaagtgatatgtatccttctgtttttacaatttcatatacatctaattttttgtctggtacaactgcctccgcttcaatgaatgtttgaaattttccaaagtctattctattgtcaactttaattacatctttaattaattccatagtctacctccttaagtattataaaaatatcacactatatttatatttaaggagcaaaaaaaaaattacacctatttttaaataggtataattttaacttatttgtaatttatcttgatctctaaaaacttgcaactttacattagatgttaataaatctgagtaactataagatactctaggatatccattactttcatcatctaactttataacaaacacgcttggataaactttttctagtataccctcttttgtaataatctgctttcttcctttattagctttcaacaatattttctttcctatatgtctctctaagcttactcttatcttatctagagtttgaacagtagccacaatatcaccttctttaacgtttatatgtttacataatatcacatataaacatttttgtcaaatgtttaaactaattattttatatattttttgcaaaaatgtcaatactatttttgaagatatacagtataattatgttaatttttgctaatgtaatattgtttttggcattgcccatctaaattttcctcttgtttcagaaccaccaattcccttaacacctgtaatagtctgctctataacctcatcaataggaactactacatcaattcttgaacaagcaattttctccactataaaaacagggtctaatgcatgtatcattattcttccaggcgaacttgcataatttgctcctgcacttattattttttcataatttgattggcatgctcctgcgaatatgacaagattatccaaatttggttgccatttacgtgcttcttttactgttttaacaaaatttgaagagtttctatagttactcatatcttctatatctcctctttttattgtcattgcatcatgacctgttattactagtatatccggattatatttttctagtagtgctcttacttctttatactgattttgctctgaaacagctacacctactgcaggtattccaagttgagcatatacatccaagcaaatttttaaatattctttatctccatctatctgtagtacttttccaggcattccatatgtgttaggatttaattgaagttttggaactgctctagtcattcttttttgtctttctttagcttttcttactgacttatataataaattttctacatttttatctattaatatatcttttatatcaggtgcttttactaattctaggtcatcaatataagcatctgctattactctaaatgcaattccctttagtatagctattttctcattattttcatctacaccaaaagagactattttaaatactatatctttgttatgtgactttctagctacaatgtctcctaccttcatagttaaacctccaataaatttttatcttagtttatactatgttcgatataaaactttgtttcctaatgtcaaaaaaacatttcttataatacttcttttatcactcttaaagcatttttatagtatatcttttctatatcatcttcactaaacccttctttttttagaggttcatacagtttacccatctgagatatatcttcaatctcaacttttgaatctattccatcaaaatctgaccctagggatacaacatctattcctccaacatttacaatatgttttatgtgtctaaccatatcttcaagtttactttcacttttatcacttaaaaataagtggaagaagtttatacctgtaactccacctttatttgctaatactttaatcatatcatcagttaaatttctagaatgattcatcattgctcttgaattagaatgtgtagcaattattggtttagaagaaatctttgcaatttcataaaatccaccatctgaaatatgagaaacatcaaccaacattcccaattcattcatcttatgtaccacttctcttccaaaatcagtaagccctttttctctatattctactttattatgaggaaagctcaattcattcacatgattccaacttattgtcatcattctaacccctaagtcgtaaaatttctttaaattttctaatttaccttcaagtactgcaccttcttcaatagataaaagagctgtaagtttaccttctgattggtttttcataatttcttcatagttagtagctaaagctatttcatcactattttttttcatttcctcatgaaatttatttgccatactcatgcaataatcaaaaggatgttttacttcttcagtatcaacaaaaagagcaaatgtttgagctaatgaatccccctttttcaatctgtctatatcaacagaatatttattagacttaagttcacttgtttctacattttccattaattttgctatagtatcacaatgtaaatcaataaatttcatatttataccccctgtatattttatatttatatctaaaaatagaaatagttgtccttatagacaactattgacaactattttttaatattctttttaatattacttaatcttattcttcttttaagttaggtattacttttttaacttcttcaatttgatgccatgttttatctatattattttcactaatatatttttttaaatcagttaaagatgtaaaatctttaactgataaattgtcatcatcatctgcaaatcttaaaataaacatgagactcccttactttccacaacatttcttatatttttttccgcttccacatgggcatgaatcatttcttcctatttttgcttctttaactattgttttagacttcttataagcctttattatttcttttctttggtctgctggtagtatatcttcccaaccttgtaaattatatagccaatgagcctcaacagttaccatattgttatataatttttcccaatctatttttatagaaacttctttatcagcttctacttcttctaaaactatatcttcttttaagctttcacttattccatctatgaatcccatgaaaaattcattagtagttccaaatttttcagccaattcacttactttaccttcaacaacatccattttattatttaatatttcattgtatattccagcttcaactttcaaatattcttcccagaattttacttctgcttcttgactttcatgattatcacttaaatttctccattcagtatataaactcatactttttcctcctaagtatacctatatttttatagtttttatagtataaaatcttttagttagattggaagtttcttctttttgattataccatattctatttaaagttaactcttatattatatcataattaaacaattcttttaatacttttatagcatactcttggtttataaaataagggcttgtcgcaattgttattactttggcttttttaattaagttttttatcttgtaaaatttgagttcaaatggtatatagtccatatcacttgaaaatatatccaaatctatatcaagaacaaactctgattctacttctaaatcaaatccatacagactatctattattattaattctgaaaatatgttatattttaaagcaggttttataaaacttcccacatttaaaacttcatttgtatacctaaatacatcttttagattatttacatctacatcatagttctcaggctctctagtatccttatgttggtctacatgcactaacttgcatccttttgtaaattcaccctttaacaaagattttgcccaaaaataaaatgcatggttatgattgtcaaacacatatatctttttatttcccaggacatattcgaccatattctccaatccttttgcttttatttccttattttcatctacttcattaaataccacctcattgcctaaccttacatcatttaatgtaccatttataagttttggaacgtatatgctcttattttctcttttatcatatgaaaatacattatttcctactggtttttctatataaaatccactatattcataattttccataaaactttatttcctccattgttatataaatatataagttataattttaaaaattaaaatgcacttattgtaaatcatattatctattatagaaaacatcttatataactaaatataatatcttctctcaatatgtattatacaataagtgcaaaatatatttatataaaatatactacattcctataacaaaaccatcagcttcaattggaaggtaactaactcttctattcaactccacctttccaaaaaatactacccaatatggtctaaaaatactttcaattttaactatttcaatctctgggattcctcccataaacctatgaattaatctcatagccattttatttgcctttgcttttactcttcgttcgtccttattactatactgcacaatattacaatccacattttttacaatttcatatgtaggaaaatcttgtactatactaccagaacctgtagaaccattcactaaaatttttaattcatttatatcattagaatatctcctattcttgaaaatggatttcgttttgtgaattttaagtgtgataattttaaactctatataatgaagtctaacttcatgagcatatttgttctttaatattagcttactaaataaagaatttttcccacttttagctatctctatagcttcttcttttgtaattcttataggtaacgctcttatatccataaaatcattctctttcttatttttttcttgtcatttttaaaactctatatatataatcaaaaaatattacaattacaactgccataactccatatggaattatttttccaactataatatcatttctagtcaatataccataaaatataaatcctgttattaaaaagtacaataatactagaaaaccgtctactccaagccattttatttctaaatctttttttaccttagacactaatttagacatagcagtttctccttttatagattattttgtgtatttaaattttcacctattctattaccaatcatccatgcaataaatgaaaaaggtatagctatcacaagaggctctaactcaaagctctgaactggaaatattttaaaataaccaaaagtcactccacctacaatcattcctaaaataccacccatagatgttcttcttccatttccaagaagcccacctactataggtacaaatgccgaacccatccaaatacttcctacaaatatacatgcatcatatacattttcaaatctaaatgctacgctaagccccataactgctgctaaacatacacctattctagtaaactttactaattgtttctgagataactctttttttgtaattcttccatatatatcatttgctaatgtagctccagctgctagataatagctatccaatgttgatattatagaacctaaaattcctattataaatattactcttattccttgtggtaatgtatctaaaactaaagttatatatccagcggctggagccatctctggataagtagctcttactataagtcctgttatagttaacaccatgtcaaaacatatccatagtgaaaaacaagttaataaggctcttcttccaaccttaggagaatctgctgctgaaaatctttgataaaaagttgggtctgaataagctccaaaagaatatacaattaacatcaatgctttcatagctgacataccttttgtagggtgcataagctgtggtgcatctttgagtgcttctgtgagaccttgaaatcctcctatttgttcaaattgacctggcataaccatagttaaaccaaataccatacaaaaaaacaataccatatctgtaatggcaactcccataagcccaccaagtactgtaagtacaacgactactcctaccattattaatcctattaattctttatctattttccatgctacgttacctatagttcccatagcagttatttctccaagttgtgcacaatatataaacatcaaaattgccccaattatagcaacatgcttaccataaaaactttccagtaaatcaggaactgttatattggttcttatatgaatccttggaccaacccacaatgctaaaggcattctcccaatatgtgcagctattgaccaaactgcccatgcagatattccatatatagccgcatactctacactacctactgtaccaactcctccataccatgatgcaaccaaagttcctactattaaggaccatggtaaacttcgatttcctaggtaataactttccatatcttttacatttctagaaaaataataacctattcctaataatataaatgcaaatataactataatcccattttcccaaaatgttaacatatctaatctccacattcttatattttaatttttaactttaatatctaaatatgaacaactctacccatttccataaaaataggtagagttatataataattataagtatttaagtaatcttgttattaagcaattttattgtttaaacctttattttctcttttatttattttatttaaagcataagtagcaaatatccctataactgcacatactacagataaaataaatatatatgtatatcctgtttgtccatatttatctaaccaattacctgcaatagtgtaataaaacgcatctggagaaaatcctataaatgaagcaaatccaactactgctcctgtagtttctaaagatatattagactctgaaacagatgcaaagtatatacctctaaatccaaataaaattacacttagtattatcatgtttattacagctatccatataaatcctgtactcttaggaataaccaagtaagcagctgtacttactgtcattaatataaatcctacaaacattactcttatagatgaaccaactttatctgttataacaccagcaactggagatgctcccatttttataacataagttcttattattgataaagcagaaactagagtcattggcattacataaacttctgataagtatggacttaaataagttaaacttgagaatactaaataagttgaaaatattataagaccaattaaccaagcctttggcattgtaactacttttaacaatgacttaatacttaatccttcatctgatgctccactatcttttttctcttccactaagaaaaatagaagtataccacatattatagatgctgcagaatataaccatactacatatttgaatcctactgttatttcagcaaatttaccaaagaagtaaagacctataaaagaaattaacgtacctgatacacctgataacccttcataaaaaccaaatattcttccttgttctgactcacttccttgcattctaacaaccttaacagatgctgagaagaaagttaatattgttgtaaatccccataatacaaatattaagagtatcatactatatgatgggaatgtagagaaataaaaaccaagtactcctgaagcaattaaagaaaaagttatcagctttctaaccgagaatctatctgcaaaccatcctcctataaaataagataccattcctactaatccatataaactcaataagttccctatttgtgtatggctcaatgataaagcttgttgcattgggtcataaaatgatgatttcatatatggtaaactatacatagccgttgttccaaatgccaatatgaatattatcaagaatcttttaaaattacttttgttctccattaattttctctccttaaaattttattgtttataatctcattcatgtaattttattttaatttttttattgcttgtttaaagtcatttattatatcatttgaagattctaatcctacagctattcttattagattttctccattcatttgaactaatgtatgctcttcccctaagcttgttgctattgttgcaagctctaaagagttcattaattttctactagcttggtctcttgtcaatccattgataccatccttaagtttaaatgaaactacacctccacctaaaccattcatttgagttttacaaagctcatattgaggatgagattttaatgctggatactttaccaattccacattctcttcttcctctaaaaactctgctactgctaatccattttcacaatgctttttcatcctcatatctaacgttttcatacctcttaaaatcatccatgcactcattggtggtaaagatgctcctgtaaaacaacataaacttggccatctaactaaatctattaattcttttgaacctgctactgctccccctaaagtatccccatgtccatttataaacttagtaagactatgtattactaaatctgcacctaaatctattggtctttgtacaattggtgtcccaaaagtactatcaactatagctaagcttttattttcatgagcaatttctgctattgtttttatatctactaagtctaatgatggatttaaaggactttctatataaactattttagtatttggtctcattgcttcttttacattttgtggatttactgcatctacaaatgtaacttcaactccaaatttagataacaactcagacatgaataatttagtgtgtgaaaatattccatctgaactaactatatggtcaccactttttaccaatgctaatatagtagatgttattgcccccatccctgatgtactagatatggcactttctgcattttcaagcatagccaacttagcttctaactctgtaagagtaggattacactctcttgtatacacatatccccatgtcatacacaactcttcaaaatgctctactgtctttgcagcaaatgttgctgtttgacatattggtgtagccaatgcacctgttgttgggtctgcactatgtccccaatgtattatttttgtctctaaatcttgattaatattgttactcattttgatttcctcccattttgacttatttatacaacgttttccctgccaaatttaatcaatttagcttagtcttaatacattttttcaagtatacttttttatttgttataatttctaaaaatatgacacttattttgtttttttacagttctaattataaactctatagtaactatagagtcaatatgtttttgatattttttttacaatgtttaaaatagtcagtacaaaaataggtatatcttagaataactaaagtcatcctaagatatacctatttttatatcacaatataaataattacatataagcattagtttttttatcataaatagatttttcaagatttatcatcttttcataaatatattatagttaaatattttaatattacctaacatctacaataaaatatactcttaaaataaaattatataattaaaaatactctataaaagctaaaaagttttctattcgctacatctaaaaataattagatagaggtataaatgtatttagtttatttatacctctagtcttttataaattatatctctactaaattgattttttagcacgaataagtgtgctcttggagataccagtcatcttcacaacctctctatatggcttagaatttaataaccccaatgcatattgtatctgttgattgctgtatttctttggcctaccatctttaaagtcctttttctttttagcaaattcttttcctaattgagtacgttctattatcatatttctctcaagctctgcaactgcaagtaatgtagtcaaaaagaatttacccattgaagtattttctaaaagacctatatttaaaatatgaacacttacttctttagcaaataaaccttctattagttgtatcccttctgatgtacttctagctagtctatccagcttagttgcaacaagtaagtctcccttttttagagatgatataattttttcaaatttaggcctgtttgtagtagtgcctgtataagtttcctttattattttagcatcattatatttattcaaaatttcttgctgttgctgatacaaactgttgttgtctgtttgattttttgtacttacacggcaatatccatatataataatcatcacttcctaacataaagattttgtacagaagttacccagaagcttgtttttacttatctttatccattttactaaaacgatttttgggtgtcaatactgttaacttttgacaccataataattcctttataatttgtttgactatgtcaaaaattaccaatataatgaaattaatgagtttatacaaattggaggaaataatatgaatagtctgttaaaagaagcaatagatgaattaaaaaacatccattgcggggaagtttttttattaaaagaattgttcaaaggctatgaatggaacaggttggagatgaatattagattgaaattaggaaaactttttttgtatgaagtggtaactaatcccaatttaaatgtagaggtcatcaataaaaattctgcttatcagcaaatgtataaaaaaaaatagtgacttaaatgtatataatagtataatcttcttattgattcaaaagttaaaacttttaatacaaaacaatcattctattttaacatttatcaatatgtctaaatttatataattaacacatacgaatagtattgtttaaatcacattatttaagatagataaatcttaaccctactccagcataaatactaaaatagggcttagaattatctatatttttatcccataaaatgcttagctcttcctcttgattgaacatatatatctggggaaatacaatagaagcgtaaatttataaaatttccaaagtcagaaaacttcagttcaaacttaggtataccaaaactttcaggtgctatttcatcaacgccaaaatagatgataattccattatctgtaatataaaatgcttggtcttcaggtataactaactcaacattagaataatacatttctctattttcatttatttgagatttaatgtaatcagtaattatattaatataatcaactccatctctaaaaatgtcattaagtaaaagttcttttccagttgtcaaatctatattgtaattattcaatgtattgtatttaggcccatagttattagcaaaccccataaggtttaatatcatactcagtacataatttttattaaaagtaactgcgtaactggtagatacccaatagctttgttttggaagtgaattttgagaagctgcgttattatattctcgttcttcttcctgtaagccatttttaaaattatttacagtcattcttacagcattgtttatgttatttaaaataactgggtttacatacgtggattgatttctaatattgtatataacaggatactttacatcatatgaaaaatacttacttctttcaaaatcttcattaaattgtacatataatatattatatgtacaggtatttgtagattgataattttccattaaaatcctcccccttttataaaaaaatcagatacaatataatatgcttaaaacagtaataatgttaatagtaaatgtaaagaatagaaagtatctaaaacagcaaaaaatgactaattttgtggtataatacataggattgagagttattttataggaggaaaaatatgttattattagcagataaatggaaagattatgaacttatagatatgggaaatggagaaaaattagaacgttggggaagttatgtacttagaagaccagacccacaggttgtatggccaatggaatctgaatgggctttatggaaaaaccctcatggacattatcacagaagcaataaaggtggaggtcaatgggaacacaaaaaaagatatccagaacaatggactataaattataaaaacttaaagtttcacattaaaccaactggctttaaacatactggattattcccagagcaagcagctaactgggattggatgatagagaaaataaagaaagctaacagacctataaaagtgttgaatctttttgcatatacaggtggagctactgtagcatgtgcatctgctggtgcagaagtatgtcatgttgatgctgcaaaaggtatggttaattgggcaaaagaaaatatagaattatcaggtcttaaaaatcaaacagtaagatttatagtggatgatgttgtaaagtttgttgaaagagaaataagaagaggtaaaaaatatgatgcaataataatggaccctccttcttatggaagaggtcctaaaggagaagtatggcaaatagaagaaaagttatacagttttgtagatttatgtatgggagttttatcagataaccctttatttttcttaattaattcttatacaacaggattttctccaatagttcttgaaaatgtattgtctacaacaataggtaaaaagacaaatacaggagatatatacggtggggaattaggaataccagcttccagagatggtaagatacttccttgtggtatatttggaagatgggagaaaaaataatgataaaagtcatatatgaagataaccatttattagttgtagaaaaaccagttaacatattgtctcaaggagataatactaatgataaagatatggtaaatcttttaaaagactatattaaaaaaaagtataacaaacctggaaatgtatatattggtttaatacatagattggatagaccagtaggtggagttatggtgtttgcaaaaacatcaaaagcagcatctagattgtctgagcaggtaagaagtaagactttcaaaaaaacttatctagctgttgttcatggcaagataaaatctaactcagatatactaaaagattttttatataaaaataaaaaaactaatatggtaactgtagtgaaaaaaagccataaagatgccaaagaagctgaacttaactataatgtattagattttaaagaaaatctaagtttagttcaagttaatttaaagactggtcgttctcatcaaataagagttcaatttgcaagcagaaaacatccattatacggagaccaaagatatggcaaagaaataaataagattggacaacaaatatctctttggtccaataagatagaaatttgccatcctactacaaaagaaaaaatggaatttacatgtcatccacctgacaaatatccatggaatatattttaaatctcaaatgaggtgattatatgagtaaaaaattttcaataggagaaatgtctaaacttcataaaataagcatacagacactaaggtactatgaccaaatagatttatttaaacctgttcatgttgaccaagaaagcaattacagatattactcaattgaccaattttcacaattagatattataaaatatttaaaatatttaggtatgcctttaaaagaaattaagtcaaagcttgatgaaaataatgaagaaattctaaaattactaacaaataaaattaatatagtggatgaaaaaattaaagaattagagcttataaagaaggtactaagcacaaagaaagaaactatggaaaaaggtatgaaagtagatgaagttggtaaaatagtgagaaaacatattccacgaagaagtatcttatctatagagtatgaagaaggattaagtagtgaagaaactatggaactttccagaagacaaatagcaaatatattagaagataatatatctgtgttctatggtggagtaagtggacttgtatctatagataaatttttaaaagaagataaagttatttatgacaatagttttgttactgttgaaagagacttatttgatataaaatcacaaaaacatataacagaaatttcatctggtgattttatttgtatgacatataaagggtcttacaaagaaaattataccgcttttaagaaactggttgattatgttgaatataaaagaatacctattgaaaattatatatatgaaatacctataatagaccctctgtctacaaacaacgaagaggaacttctaacagaaattcaaatacaagttaaaaagagagaaattgacttaagatgtctagtgtagtaatctagtttacttacacatcttaatatagttgtctattatcaacatatgatttttctagatagtgattcctaacagtgagattttcaaaaaataggaggaaatatggctaatgctaattccctcctatttttaattaatccatatcattttaattaagccatgtcatcacgaagtgcatcaataatattttctttttttatcttattaatagtatacaacattgtaataaatactataaataaaacactaaatatactaattccaatactaaaccatggaatcacaaaatcaatatcatctgtaaccattactttatgaattagccatgaagaaattactgctataggaagtccaaagaacaatgctctcatgccataaaaagcacactcaaaattcatcatcttttggaaatcatgctcagacattcctacagagcgaagcatggcaagttctctacgacgtaacttaatattagttgaaattgtattaaacacattggcaatcgaaatcagagaaatcataattatgaaagtataggcaaaaacattggcaataaaaatgtaattacggttctcatccatcattccatacatattgtacagattgtactcattagtaactccctcactctcaataatttgctccatttctgcaactgactgagtaggatttttcgattgaaagcttaaactttcaattcctgtagaaacaccaggaatctcaaacttatctttggctgaataaggagccaatactctgaagcttgctttcttcacatctgaacttctgattcctggaggagaatcaggtggcactactttgacaaatgaaatattcacattttgtctctcaggtatctccaacttgccattagtttcaggagtgagactaacattcatagaagaactgttgaaaatatcaataatattattatcctttgttaccatagaaacagcaatcagttttgcattttgtccagtatattcttctgctggtaatccaagacttttaataatattcagataagttctatcatcaagaaattgcatatctactggtaattcaagcatttcactcatagaatgtgaaccctcatagttcaaataatcgtctgtaagctcacttactttggcaacacatgaataggtcataagtttctgatacaaaccttcgtaaacaccatttgcagtttttagcttatcgtaaagcttcaacatttcgttgtctttcataccttgtgtagaaaaaataatatcctgatcagtaacctctgacctctgatttgacatctgttttaggtctgctactaaagcacttgtagatataaataaaactatgcttaaaacaagcgacaatacaatacttcgataacgtttcttgtttcttttaaagtttttcatagcaagaactccctcaagaccataaactcgctgtgttagttttgatgtcttcacagatttagattcaatttttacctcatttgtctgacgaatacactccatcactggtgtgttggcagcctttcttgctggtatgtaagcagaaattaagattgtaaccatacttaccactgctgcaacgatgattgcagggatagacaatgttaatgtcaacggaacgtttacatagagaatatttgcaaagtttttagctatgacagaaatcacaagtccaatactgactataccgattgcaacaccaattggtataccaatcgcaccaatgcaaattccttcaaatagcaccgaatttcgtaactgttttgctgtagctccaacagatgaaagtattccaaattgatgtgttcgctcgttcaatgacatgttaaatgaattatatattagaaaaattgagcctagcatgattatggcaagcacaatgccaccaaccgagtacaaaaacatattgaacaaattgttatcagaaacacctatgaagcgcaacacattgtcattgaaaatggaagcatggtctttagtgctacttgtgtaagagcgaatctgatgtggatttttcaatgtgacaaaaaggctaagactgtcagtcttgacttgtttatcttctttggttatcaaggtatatcctggtgcagaagattcttcaaatacgggctttctacagatacccacaactgtataagttttcttatcctgtggcacaaaaacttcactcccagcagtgtaggggtcactctgaccaagcttttcattttcactcattcgtttccctacatccaaagaaatagtatcacctactgcaaatttgacaccaccatctgtcgcaactttacttgaaacaagaatctctctactattttcaggtaatcttccagaaattaaagttataggcaaagtatcaaaagcttctttgctaaatccagcaataaaaagatatggtttatctggatttctgttaccttcaagtgttgcatagccaatattttcaaatgttgcagtatttgcaacttcatcattgactctttgttcctgtacaaaagaagaatccacatccaaaaactggacatgccaatcaccatattttataatagctccatttgtcatatagttcatcaaagaaactccaaaggtagtaactgctgtaatcatagcagctgacagaacaactcctataattgttacaagagttcgagtgcgattctttttcaatccttgcagagcaactttgttaaaaatgttcattaacgattcaccttcctctcatcacgcaccacttttccatctgaaatacagataattctatctgcctgtaaagcaatgttttcatcatgtgtgacaataatgagagtttggtgatatttactatggctctctttcagtaactggataatctcttgtccatttttactgtctaagctacctgtaggctcatcagcaagcataactgctggtgcattcatcaatgcacgaccaatggcaacacgttgctgttggcccccagaaagttgatttggtaaatgtgtttttcgttcttttaaaccaagtaattctaacaagtcatttaaccgttcttgattgaccttacgcttatccataagtataggcaatgtgatattttccactacatttaatgtgggtatcagattgtgaaactgataaatcaatccaacttgtcgcctacgaaaaatagcaagtttttcattgctttggccatatacatcttgcccctccagatatatctttccacttgttggtacgtctactcctgcaatggaatgtagtagtgtagatttaccagaaccagaagaaccaatgattgcagtaaactcccctttttcaatagtaagtgagacatggtcaagtgcagtaaccttattttcattcttaccataaaccttacataaatcttcaatctttaaaaacgccattatataagtctcctttcatattttataaatatatcatagaactttcaacttacatttaagtgacatttaaatgagagattcgtcactttggaaaacgaataacaaatattgcaccaccttgtgggtgattttgtgcagtaattgttcctccttgtctcataataatcgtcttacaaagtgccaatcctattccataaccagctgtgcttgaatttttcccacgataaaatctgttaaatagacatggtaagtcttcttttttaaagcctgctccgttgtcatgaatagtaagttgagtaaacaaaaagttgtcctcacaaacgatatcaatttttccattatcacccacactctccatgcagtttttaaatatattttgaattgcttctgaaagccaatttaaatcacccaaaatccttactccttttggtatatcaatatgtaaagtgatattgtgcagttccatgggaatcaaaagttgatgaagtgcagaactaatcaaattattcacatcaatttgttctttttgaaagactacaatacctgcatctaaacgtgataattttaaaagggaagtaatcagccagtccattcgtataagtaattcctctgtttctcgtatcaactcttttctctcatcttcatcagaagtattctctaacagtgacaaaataagagttactgatgtaagaggagtgcgaagctggtgggctatgtcagctagtgagtcagcaaggtgttctttttcttttttcagtgcgtaattttgctctctaatacgtaacgtcattttagttatttcactttgtagaatagaaagctcaccctcatctgattcagcaatatacagatggttagcattatgaagcacaagattaatttgttctgaaatctgtgcaatacttttgtatcgatttttagtaaacacaaaaaatgctattccaaaggtagtggcagaaacaatagaaagtattccagtcataatactgattgcaaatcccagggctacagtgagaatagtaattaataagaataaaatagcaaattttcgaaactctctatttcgaaacataacttccccccaatctataccctgtcccacgaacagtcaaaattatttgtggacttgaagggtcatcttctatcttctctcgcaagcgtttgatgtacacagtcaatgtgttgtcattaacaaactcacctgccgcatcccacaattcatcaagtaatcttaccctcgtaataatacttttaggattgctaataaacaccaataacaaacggtattctaaagctgaaagaaaaacctcattgccattctttttcacaacaccggttgccgtatctacataaagcccacaaatttcaaaagttgacccaaaacgcccactttttcgtagtgctgttctaattcgcgcaatcagttcacgtggacgaaaaggtttagtaatatagtcatctgcacccatattcagtccagtaacaacacttgattcatcaccagaagccgtcaaaaagataacaggaatgtcttgcttttctttgatttctgtgcaaatcgtaaacccatttccatcaggtaaagaaatatcaataagtgccaaatcaaatttattcttagcaatctctacaagtgcttcacttcttgtggatacatgggttactataaatccttctgaattaagcaaaagaataagatttttggcaattgctttatcatcctcaactaaaaatatccgtttcatttactttcatcctcctttattttattagttttatatattccagcagagcaatagtacactactattttacttatcattacacaattttcagtagtttcttttgttcttatataatccatgcataatacctccattgatttattatatttcttataacataaatacacaagataagacaaaaaacataatgtaagtgcaagttttttaactcactaacttataaacatacactcctactaacactactttcttgatgacacatcttacaagcttatattcatacatcaatgaaaaattaaatttatccatttattaaaataaaaggcaatagcttctatagctaatgccctttatcttaaaatgatttaaatactatacaatttttataaatggctataaataaactcgtatagaatataaaatttatctacagtcttttgttatacaaaatttataacctcttatagaacaaatttaccactttgtaaacttatcacttttactcagctatattataaacttttaatttatctttgtttaaatgtttcttcttaacttctactaaagcttttagcgtatccaaagatgtcattatttcagtagaaaattcaatggctgttcttctcatcttaaatccatctcttgtagagtcatttcctttagttggtgtatttattactatatcaacttgtttatttcttatagcatctaatatgtttggtctaggctcttcaattcgatttactatatcagcctctattccattttctcttaaactcttcgctgttccttctgtagcaacaaaagtatatcctaattctttcatatcttttgctatctctataaactcatctttatcatgattatttacagtagcaagtactactcctctttcatcagacatatgtctacctgctgccaagaaccctttatataaggcttcttctaaattttctcctacacctaggacttctcctgtagacttcatttcaggtcctagacttacttcaactttagataatttagacattgagaatactggtacttttactgatactaattttggctctttgtaaactcctgtaccatatcctaaatcctttaatttagctcctaacatacacttagtagccaagtcaactattggtactccacttactttacttatatatggaactgttctactagctctagggttaacctcaattatatataattcattttgaaattctataaattgtatattaaccataccaagcacattaaggtctaaagctatttttttagtgtattctactatcttttcttttatttcatcagatatattttgacttggatacattgttgtactatctccagagtgaactccagctctttctaaatgttccattataccaggtatcaatatatcttccttatcacatatagcatctacttctatttctctaccagttagatatttatctataagtactggatttttatggtctctatcaaatgcatcatccaaatactgaattagtttttcttcgttataagttatttccataccttgaccaccaagtacataagatggtctaactaatactggataacctaactccttagcaatttcaacaccttcattagttgtccatacaccttttccttttggtctatttatatctagtctctctagtaaatcatcaaatttttctctatcttctgctgcatctatatctctaaagtctgttcccagtataggtatatttttttcatgtaaaaacttagccaattttatagctgtttgtccaccaaactgtagtattacaccttctggtttttctttttctattatatttaaaacttcttcttctgttaatggttcaaaatacaacttatcagatgtatcaaaatccgtacttacagtttcagggttattgtttacaattatagtttctattcccatttttcttaaagattttacacagtgaactgaacaatagtcaaattctataccttgacctattcttattggaccagaacccaatactacaacttttctcttatcactaactactacctcatcatattgttcataagttgaatagtaataaggtgatagagcttcaaattctcctccacatgtatcaaccattttataaactggttgtatattatataaacttctcaattcatataatttttctgggcttatcttcattaagtcagatatacctttatcagaaaatccctttttctttaattcatgtaaatattctttatctaagtcttctatttttagaacttttaacttttcttcttgttctactatccatttaaatttatttataaaccacttatcaacaccagttatttctgatatcatttctactttatagcctcttcttatcatttcagctaagtcaaatagtctctcatcatcaggtactactactctagcctttaattcttctaatgttctaccttctgatggagcatgaaccaatgaatattttcctgtttcaagtgatcttatccctttaagaatagcagcctcaaagttacttcctatactcatgatttcaccagttgccatcatcttagttcctaattttctatttgcatgtctaaatttatcaaatggccactttggtatttttactaccacataatctaatgttggctcaaaacaagcataagtttttttagttactgcattttctatctcatccaaagtataacctaaagctatcttagctgctacttttgctattgggtatcctgtagcttttgatgctagggctgatgacctactaactcttgggtttatttctattatcgcatattctaaactatgtgggtttaaagctatttgaacgttacatccaccttgaacctctattgcatttattatgtctattgatgcctttctaagtagttgatactcttcatcacttagagtttgacttggagcaacaactatactgtctcctgtatgaactccaactgggtctacattttccatattacatacagttatacagtttccatttccatctctcattacttcatattctatttctttccaaccttttatactcttttcaagaagaacttgtccaacaggacttagctgtagtccatgtgaaagtatttctcttaattcttcctcagtatcagctatacctccaccagttccacctagcgtatatgctggtcttacaactactggatatcctatcttattggcaaactcaagacctgcttctaaatttgtaactatatcactaactattactggttgatttatttctttcattacttctctaaataaatctctatcttcgcccttttttatagattctatagatgttcctataacttttacattatatttatctaatataccagcatcatgtaattctacagctaagtttaatcctgtctgaccacccatacctgcaagtaaactgtctggtctttctttttctattattttttctataaattctattgttaatggttctatatatattttatctgcaatttctttatcagtcattatagtagctgggttactatttactaatacaacttcaattccctcttcttttaatgcttggcaggcctgtgttcctgaatagtcaaactctgcagcttgacctattattattggccctgaccctaatactaaagttttctttatactatctaatttaggcataactctttctccttatctaaacaattttcacagttcttatcttcatcatctatacaatcaactttaattactttattttatcttaagttcaaatttactcatcaatacatctatttaatacatctatgttaattaaaccaaactttttgatttaagttattcttgttttttagttagctattctaatgttatttattttactaattctaaaaatttatcaaaaatatagtcattatcttttggtcctgggcaagcttcaggatggtattgaacactgtatacatctagcttctcatgtctcattccttcaacagtattatcatttaaatttatatgtgtcactttcatttgttcaggaacttctgaaacataataaccatgattttgagaagttataaatacttttccttcttctaaatctttaactggatgatttccacctctatgcccaaatttaagtttagcagtttttcctccaagagctaaagctaaaagttgatgtcctaagcatattccaactataggttttttaccaataagagcttttatattttctataacatcttctaggtcttctgggtctccaggtccatttgacaagaatattaagtcagggtttatactcaatacatcttctggagatgttgtagctggaaatattgttatatcacatccacgagctataaatgatcttaatatatttctttttactccaaaatccataacagccacttttggaccatttccttttatatgctctacttcttttcttgtaacagttctaactgcttctgtatttgaaaacttatccaatttatgtttaacatcttctaatttactgtcttctaatgtaattatacctttcattgttccattatttctaagtatcttagtcaaagctcttgtatctattccttcaagtccgataactttattttgctttaaatattggtctatatcaatttcacatctaaaattacttggagaatcacttttctcccttactatgaatccctttacttgaactttttcagactctgctgatgataaatttataccataatttcctacaagaggataagtcatagtaactatttgaccatagtaagaagggtctgttaaaacttcaccatatcctatcatcgaagtattaaatactacttctcctacactttcttctaaatatccaaatgcctttcctataaaaactgttccatcttctaatattaaccttgctttcatactacagtacctcctataattctctttagacaaactaaagaacattaactaaatataagcttttaaatatctatatctatttttcacttttacattctagttttatacttatttacatttattttttatctttttctattatactacaaatttcttaaaaaaaagaagttatctcaaaagtaaaaactcctagaaaaaataacctctttttttttatttaataattaaattcttaaactatacaatcaacttaatttctattcagctatattgtaaacttttaactcatctttatttaaatgtttcttcttaacttctactaaagcttttagtgtatccaaagatgtcattatttcagtagaaaattcaatagctgttcttcttatcttaaatccatctcttgtagagtcatttcctttagttggtgtatttattactatatcaacttgtttatttcttatagcatctaatatgtttggtctagattcttctactctatttactatatcagcctctattccattttctcttaaactcttcgctgttccttctgtagcaacaaaagtatatcctaattctttcatatcttttgctatctctataaactcatctttatcatgattatttacagtagcaagtactactcctctttcatcagacatatgtctacctgctgccaagaaccctttatataaggcttcttctaaattttctcctacacctaggacttctcctgtagacttcatttcaggtcctagacttacttcaactttagataatttagacattgagaatactggtacttttactgatactaattttggctctttgtaaactcctgtaccatatcctaaatcctttaatttagctcctaacatacacttagtagccaagtcaactattggtactccacttactttacttatatatggaactgttctactagctctagggttaacctcaattatatataattcattttgaaattctataaattgtatattaaccataccaagcacattaaggtctaaagctatttttttagtgtattctactatcttttcttttatttcatcagatatattttgacttggatacattgttgtactatctccagagtgaactccagctctttctaaatgttccattataccaggtatcaatatatcttccttatcacatatagcatctacttctatttctctaccagttagatatttatctataagtactggatttttatggtctctatcaaatgcatcttgtagatattgagataatttttcttcgttataagttatttccataccttgaccaccaagtacataagatggtctaactaatactggataacctaattcattagcaacttcaataccttcgttaagtgaccatacaccctttccttttggtctatttatatctagtctctctagtaaatcatcaaatttttctctatcttctgctgcatctatatcatcaaaatctgttcccagtataggtatatttttttcatgtaaaaacttagccaattttatagctgtttgcccaccaaactgtagtattacaccttctggcttttctttttctattatacttaaaacttcttcttctgttaatggttcaaaatacagcttatctgatgtatcaaagtctgtacttacagtttcagggttattgtttatgattatagtttctatgtccatttttcttaaagattttacacaatgaactgaacaatagtcaaattctataccttgacctattcttattggaccagaacctaatactatcacctttttcttatcactaacaactacctcatcatattgctcataagttgaataatagtaaggagatatagcatctatctcacctgcacaagtatcaaccattttatatgctggtttgatattgtatagacttctcaattcatataatttttctggacttatcttcattaagtcagatatacctttatcagagaatccctttttctttaattcaagaagatagtctttagttaaatcttcaattttcataacttttaatttttcttcttgctctactatccatttaaatttatttataaaccatttatctatacctgtaatttgttctatcatctctactttatagcctcttcttatcatttcagctaagtcaaatagtctctcatcatcaggtactacaactcttttctttaattcctcaatgcttctctcctcagatggtgtgtgaactaatgaatattttcctgtttcaagtgatcttatccctttaagaatagcagcctcaaagttacttcctatactcataatttcaccagttgccatcatcttagttcctaattttctatttgcttttttaaatttatcaaaaggccattttggtatttttgccaccacataatctatagttggttcaaaacaagcataagtttttttagttactgcattttctatctcatctaaagtataacctaaagctatttttgatgaaactttagctattggatatcctgtagcttttgatgctaaagctgatgatctactaactcttggatttatctctataactgcatattcaaaactatgtggattaagtgcaaattgaacgttacaaccaccttgaacttctactgcatttaatatatctaaagatgcttttttaagcattgcacattctttgttacttaaagtttgagttggagcaacaactatactgtctcctgtatgaactccgactgggtctatattttccatgttacatacaactatacaatttccctttgaatctcttattacctcatattctatttctttccaaccttttatactcttttcaattaatacttgtccaacaggacttaattgtagaccatgtgaaagtatttctcttaattcttcctcattatcagctataccaccaccagttccacctagtgtgtatgctggtcttacaactactggataaccaattgtaagtgcataatcaagacctgcttgtaaatctgtaactatatcactaactattacaggctgatttatttctttcattacttctctaaatatatctctatcttcaccttttttgatagattctactgaagtacctattatctttactccatatttatctagtatgcctttttcataaagttcaactgctaggtttagccctgtttgtccacccatacctgcaagtaaactgtctggtctttctttttctattattttttctataaattctattgttaatggttctatatatattttatctgccacttctttatcagtcattatagtggctggattactatttattaatacaacttcaatcccttcctctttcaaagactggcaagcttgtgttcctgaatagtcaaactctgcagcttgacctattattattggtcctgaccctaatactaaagttttctttatactatctaatttaggcataaatttttctccttatctaaatggtttttactatctgtaaataatactaaatctatattaatgctaagaatttattaaatatacaatctaaatcttcttttgttgtgtattctggaatgtactgaacactatatattggtaattccttatgtctcattccttctatagtattgtcatttaaatttatgtgagttacctctgtattttctggcatttctgaaacattatatccatgattttgagaagttataaatacctttccagtttctaaacatttaactgggtgattacctcctctatgtccaaatacaagctttgaagtctttcctcctaatgccaatgctaaaatttgatgtcctaaacctattcctgtcaatggctttttgcctattaatttttttatattttcaactatatcatttatatcctctggatttcctggtccattagataataagattaagtcaggatttatatttaaaatttcttctactgtagtcattgctggtgctatagttatatcacagttacaagctttaagagactctagtacactatttttaacaccaaagtctataactacaactttagctccagtaccttttatattttcaatttcttttcttgtaacattttttactgaatctttgttacaatgctcttctaatttagactgaacatcttgtaatgatacattttctaaagttataattcctctcttagttccattgtttctaataattttagttaatgctcttgtatctattccttcaagtcctattaccttattttgctttagatatgtgtctatatccatttcacatctaaaattatttgggttatcacttttttctcttacaataagtccttttacttgcaccttatttgattcaacatcttctaaatttattccatagtttcctataagtggataagtcatagtaactatttgtccataataagttgcgtctgtcaatatttctccatacccagccattgaagtattaaatacaacttctccaatagcttcctttagatatccaaatgcttttccttcaaatactgttccatcttctaaaattaatttccccttcatataagctacctcccaaatattttatctaagcattttctatttctcttacaatattaatagctgattctcttggattttctgcttttgttataggtcttccaacaactaaataatgagcacctttttttattgcatctgatggagttacaactcttttttggtctccaacctctgctgatttaggtcttattcctgggcaaactgttataaaatcagctccacatgcttctactattttatctacttcttgcgctgaacaaacaaccccatctatgcctgattcttttgccagtttagctctctttatagctaactcttctgttgtcatattacatcctatgtcctgtaaatcttggttacttaatgaagttaaaactgttactccaactactaatggcttttctatatttaatctttctgcttcttccctagcaattagtgcacattgtctcattccttccatatctgatacatgtattgtcattaaccaaacattatctctcactgcagctctcactgcacttttcatagtatttggtatatcatggaatttaaggtctaaaaatatttttttccctttttctttaagataatctattgttttaccttttgtggcaacgtattgctctagacctaccttaaatatgtctacactatcttctaatctgtctattagttctttagctttatcaaattcgtcagtatcaattgcaactatcaatttttctttaccatttatcatttttacatctcctttttaataaagcctaaataatcataaaaaaatcctcacaccaaaagaggcataaggattttatctatacataactccattcattagctatgagatatctttcccagtctctctggactagtttaaaagactttattatatttaaatttttattttatactcatcaaaaacctctagaagatttactagaggttatatactaacattatctataaccctttagtctctctggactactttaaggaatttagctgtaatatttttctttatttatataactttatgtatctataggataatttaaagttttatcttttttataattaaaccactaattgctttttatgtcaataagtctttgaattattcttcatctttatcaaacaattttttctcaaaatatgattctgcattatatattgcagcaactggattatgcccagttactctatctttgacaactaaagttgttataggagcttccatatatttcatggctaaagtatcgtgaccaacacataatccaagaattacattaaggtcaaccttagcttcatttaaaaataaagcttgtcctattggattgcacattacctcatctgaacactttgatattgtttgagatgcttctagtccaattgtactcttaggcattgccccatttttacatataacagaaaatacttcaaacccatgatgttcaaatattttttgtgctgtttgcatttctctttttagtccaatacaaaatgctatgccaatctttttataaccacactttttagcaaactctataatctcttttagtctagtatattgacaatacccctctgcttcaactaatccagcattataagctatttttctattctcttcttcttcataaagttgctttgctttttgttgtagttcaatttctctagttggacatatcttcattaatttatccatatttccattagaacagcctctaagattacattttccacacttatacatatccaatatccccttccaaaattttattcatcttgtgattcttctttttctagagttacattttcttcttgggtttcttcttctggtttcacatgctcgactacagttataaaatatgattttcctattttattccttataggaagtttttcatatgaaacatctattttattttttatacaagctatatcaaaatgtcttaaggctacacctaagctaaccttattcatatcttcacagtgtttcttaggtctcttttcaaataaatgaagacctcgttcatccttatggaaataccacggttgagaattttttacagatggagctcttcttgtcaattctaagatatctttccactttctattcctatttatcttatttatcatatcttttactggctttctatcaggtctagcatatctcgtcctaaacaactcttcattttttgctggatatccaaatgctattattatataaggattttctattttgttttcatcatcttcttctgtttttactccagctagataatctaaatcatcttcctcatcttcttcaaaattcttattcccaatatctacaaattccaagatatcttctctctttaagtttccttccaaccagcaagtagctattcccaatgttgtaaggcgcaaaactacaccttctgtagcaaatcctatattctgtaaatagtcctcacctttgtctgatgtaactactatataatgaggtgcctttactttacattccttacccatcaaaaaatgtattatatgacctctatcaacaacatgtgctttaatatttaaatcttcatttaagtattctaaatttttacaacttctttttatttcttccatcaatggcttttttatcttcttactggaaaaatttcttacagattttctataaaaaatggcttcataaagctccatttatgccctcctaactgaaatcttctgacgtataaactctataaatttatataaatactttatattttttatagttttatttcctttttcctcctgccctattttgaaattcataagaatatctactctagtttaatatagcattcaaaaggcttaaattctaccttatcaatgtctatacattagcataatttttttatttgattttctatgctaatttaaataacaacactagctattacctttttaattaagctttgccagaaaaatttttttcatttataaatatctatctcattattatattataagtttttttcggtattcttgtatagcttttcactaaaaaagtatttttatttctactttaatattattatcaacaaaaaacatactgcttaaataagtttgttatcctcataatctgttttaattaaaatattttttttatttctcaatctataaagtataaatattttgaatatgacccaaaatctaagtaaagttataatattttataagttgttcaatattaaaaacataagtaatgttataatactttataagttattcaatattaaaaatataggaggataaatatgaatttaaatagaaatttagaaaaatacgctgaattagcaataaaagttggagttaacatacagccaggtcaaattctacttataaagtcaccaatagaatgtgctgattttgcaagaaatgcacttaaagaagcatataaatgtggtgctaaaaatgtttatatagagtggtctgatgaagaaagtactcttattaaatacttgtatgctccagatgaagcatttcatgagttccccaaatggacagcagaacaatatgtagatatagcaaaagaaggtggggcatttttatcagtctatgcccaaaatccagatttattaaaagatgttgaccctgaaagagttgcaaattttcagaaggcatctggaaaagctttaaaagaatggcgttcttacactctaactgataaatgtaaatggagtatagtctctgtgccaacaaaagattgggcaaaaaaagtgtttccaaatttatcagaagataaagcaatagaaaaactgtgggatgctatatttaaatgttcaagagtagatggtcaggaccctataaaagcatgggaagaacataatgaaaatcttaaatctaaaatggactttctaaataaaaataactttaaaactttaaaatataaatcctcaaaaactgatttgactctagacttgccaaagggtcatgtttggctaagtggagcatccaaagaccctaatggaataagttttaatccgaatattccaactgaagagatttttggaatgccacataagtttaaagtaaatgggactgtttatagtacaaaacctcttgtttatggtggaaacataattgacaatttcttcttaacatttaaagatggtaaaataatagatttctctgctgaaaagggattagatacactagaaaaacttattgaaacggatgaaggctctcattatttaggagaagttgctcttgttccatacaactcaccaatatccaatacggatataattttttataatactctatatgatgaaaatgcttcttgccactttgcaattggttctgcttataagacttgtctggaaggtggaaacaatttaaaagatgaagaattagatgaacatggtgtaaatgacagtttaacacatgtagattttatgattggttctgctgatatggatattattggtgagacttatgatggaaaacaaatacagatttttaaaaatggtaattgggctttttaacatatgattttaactaaaaagggctaatggaagttataccagacttcccagccctttttaatgttgatgataaatattttttatattaattaatctcattattatagattaattcctattgttttaaacataagtatctaaaacttatatttatattatatataaaatatcctatttagtaaaacctttattttaatttatatgctaaaaatttaactttgctatttcaacagcagactttgcatcctttgaataataatcagcgcccatttcttcagcgtattcttctgtcaaaactgcacctcctacaaatacctttgcatttatctcattatctctcagtgcctgaattgtatctttcatactttgaacagtcgtagtcataagtgcacttaatcctactaattttatatttctctttttagcaacttccactacttcttcaatagggacatctttacctaaatctataacctcatatccataattttctagcattatttttactatatttttcccaatatcatggatatcaccttttactgtagcaactattatttttcctttggatacattattgctacttttacttaataaagtttcctttattgtatttaatgaaacttttaccgtttctgctgattgaatcaattgtggtaaaaatatatctccgctatcatatctttttcctactttatcaagagcaggaattaaaatctcatctaatatgtaattttcatccttctcttttaaaagattcagtgttacattttttgcttcatcttttaatcctctttcaactaaaatatccaatggcaaatctttgtcaatctttgtagatgaatccgatttttttgaattatttatattactatattgatttatatagtttatacatcctttatctgtgttatttaatattttaaaagaattgatagcttccatcatactatattcatttggatttataattgctaaatcaagccctgcccctaaagctaatgttagaaaagaagcattaagtgctttcctatttggaagaccaaatgaaatatttgaaacacctaatatagtttttactcctagtgtctttaccattgttatagcttttatagtttctattgcttcttcttgttgtgctgaaacagttaatgataaacagtctataaatatatcttttggttttatcccacaagaaactgctctattgactatcctttttgctatttcaaatctttcttcagcctttttaggtatccccttttcatcaagtgtaagtccaaccacacatgaaccatactttttaactattggtaatatactttctaaagactcctctttgccatttacagagtttactattgttctaccattataatatctaagtccttgctctaaggcctctacattggaagaatcaacttgtaaaggtgtatctactactgcttgaatctctcttattaattttggcattagttttttttcatcaatctctggaagaccaacatttactccaagtatttgtgctccagcatttacttgttctaagcctaaatttatagcataatcaacattttcattttttaatgcttcttgtagagattttctacctgtgggattcaatctttctccaacaactgtaggcgattgtacttccacaaattttgatggtgaacagactacacatttatcaattttctcgatacatccctttgtaacagaatttatattctcagatatttcttttataaaacttggattcgtaccacaacatccacctattatagtagcaccaacttcaacgaactttttaaccccttcaaaaaattcttttgcatcaacatcatatatagcctctccatcaactatatttggaagacctgcatttgcttgaaccataacagggactgtagctcttgatgctattttttcaactattggtaaaagttgtttaggtcctaatgaacaattaactcctattgcatctacacctagaccttctatagtagccaccatacattctggcatacatccagtaaaacttcttccaccttcatcaaatgtcatagtacagaaaataggtaaatcagagttttcttttgctgctaatacagctactttagcttcatataaatccatcatagtctctattactattacatcaactccagatttaacgccttgtagtacttgtcttttaaatatctcatatgcattatcaaaacttaaagtacccataggctctagcatttctcctataggaccaatatctaaagctacatatcttggtttagtattatctacattttctatagcttttctagccaccaaaacagcattgtcaatcacctcttctacagtatacttactatctaattttagttcattacatccaaaagtatttgtaagaattacattcgaacctgcctctaagtatgctgtatgtatttctataagtttatctggattttgaagaccaaatacttctggattttcacctaactttaaccctttttgttgaagcattgttcccattgcaccatcaaatattaatatattatttttcagatattgtcttatttccacaagagttcgctccttttctatatgtacagtttctatagtttttacaattttcacacgacttttctttcttagatttatttattcttgtattagaaatacctataatagccactactgactttctcggtatcataattccattagaagtaattgttagacctatttgtttttgagcattcaaaacgtttaatatatctatatttttttctattggtaaatctccatatcctgggctatatcgcatagttataaatttatcttggtttaaaaaaaccttttctaaattattttgaacaatgtcacacacttcttctattgctgttgttccacatgaatcaattattagtccttttgttaaatttgaataagagtgtcgtcttatttctttttctatatctatccctatagtagctgccataattacacactcattacattcttttaaaagttcatatacatctttactctctaatgttaaatttgttccctctaattctacaacattatctttatttattctaataggataaatcctagataaatatctaggatttattttatttttagttatagctacacattcatcaatagtatatttaaggtctttatctatctcttgacctctgtattgtaaatatcttaaaacttcactttgatttatgcttatatcttctcttccaattaaattattctccatatatatttaaagaaaatcctttatctaaaacatcttttgcatattcctttgccccaaataaagataagtctctgtagtttccacattctatggctgtagctgctggcattttatctgattcaagaactttttttaatgcttcttctaaaccaatcttaactgttttggcatctacatctccccatagtattaaataaaatcctgttctacatcccattggagataagtctattacaccatctaatgtatctcttaaataagtagctaaaagatgctctaaaccgtgcatagcagcagttccaaaactttctacatttggctgtaaaaatctcaagtcaaatttagttactttatctccctttactccatcaagtacactacactttcttacaaaaggagcttttacttttgtatggtctagcttaaaactttctactttttccattatttaatcctccattatactttaaagtttgttacattaattctaaaaaaaactcttcctatctattattgataagaagagtatattatttcaagtcatctcatcgttgttagcaggaccacctgataaaaggttggtataggatcactgagctaactctctcccctaattcttgataagtatcttattaaactgacttaaattatatatcacttttttatttttgtaaacactttattgttataatatttatatcacataatcgtacttttattttataactaagctgattgtattattggcagttgtacctcaaacacagtttgatatttatcgcttgaaacagtaatttctccatcatgtaaatttacaatattttttgtaatcgcaagacccaatccagaacctccaacatttctatttctcgatttttcaactctataaaatctatcaaatatatttggtaaatctaacactggaattggttctccataatttatcacttttacaaccgccatatcttccattttctctgtgactatatctacataatgcccatcttttccatatttcacagcattagttataagattttcaaatgctcttaccaatttatttggatcagctttcacaattaatttttcttcattaaaattaattctactaaccataaattcttgtttaaaataaatttcaaattgagatactacttgacttaataactctactaaatttatttctattttgtttagttttattgtattattttgcattttagtcaattcgaacaaatcatttataagaacatttaaatttttcgatttttcatatgcaatatcaacataatacatcatctgaacttcatctttatacttaccttcttctatcactcctaaataacccattatggatgtcaaaggtgttcttaagtcatgtgacacatttgttattaaatctgtttttgtctgctgagcttgtctctcttcaatagttatatttctaagttgatggactatattattgattttatgtgctagttcatcaatatcatccttttctttatcctttaatatatctaaatcatactcaatatctatacttttttctaagttaccttcatccattaaatttacagcacttttaatgatttctaatttttgattttttctattagtctttcttataaaatctacaatttgcttatttctcttgtacgatatcatggaataaattgctaatgatgtgattgtaaataaaaatggataaaataaactctctcctataagacttctgaaatctcttaactgatatacaagttgattaattacagatatctcactattgaaatataataattttattatatacatacttgttaaaataagcattgaagttaaagcacagcttattataagatctaatatgggtcgaaacatatgatttaataaacttttatttttcaattttatatcctactccccatacagtatgaattattttttctccatctgtatatttttcaattttatcccttattctgctcatatgaaccattacagtattattagattggtaatatttctctttccataccttttcaaatatttcttctgtactatatactctgcctttattatttgctagtaaatataatatatcaaattctcttgatgtcaaaattatttcatttccagccactgttacactatgtttttccttatctataattactactccaacctttatgacatctttatcttcattattagcaccactaaaataatatgctcttctaatcagtgatttcactctcacagtaagttcaagtgggttaaatggttttgtcaaataatcatctgcaccagtcattatcccttgtattttatccatatcttctgattttgcacttaacataagtattggtatattcaaactttctctaacttttctacaaacttctatcccatccattttaggcatcattatatccaatatcattaaatgaatattttccttttttaaaatatctagagcctcttttccatcttcagctttaattacattatatccactatttaaaagatatatctctataaggtctcttatttccttttcatcatccacaacaagaactgtattattcatttttacacatcctaacttaatctttgtatatagctttattcatataaaattatactatattttagttagtgtaatctataaatttattcatttctaaatttccaatataatacaaattatttacacatttatattatttattttgtaaatattcttctaaagttaatccttttgaataaatttcctcggcagcatccttaccaacatatctaatatgccatggttcatatgctgtacctgttatatcttctttaccttcaggatatcttattataaatccaaacttgtgagcattttctgccaaccatttagcttcttttgtacttccaacaaaccatctttctggatttgttaaatcaatacaaagtccagtttggtgctcactgtaaccaggctttgctacatatgcatctgccttttctcgtccctgagattttacccttcttgtataagtatccagttgagtatcataagatctgtatgctgaagaccctaaaaactgtattccttctgaattagcttgcttaactaaatcttcaactgcctttgcaggttctcctgccatttgtttttcttcctctgttgcttcttcaacaaaaggtatgtttaccttagtaatattttcaggagtatagtttttgctaattccatttgtcttgtttaccaataatatatttgatatactatttgagtgatttttattttgagaatttgcctcaacatcttgttctgaatcatgttgagcagctactattggatctttatctttcttaagtaatctatctttagatataaatacacttataaatactactaaaataatggctcctattaatttaaattttttcataattaaatcttctcctttttgttatgtttgtctataatgttaattttagagtataagacttaagtattttataagtaaatcttaaataaatcttaaatttaatatttttaaaggatggtgataaaatgtctatacaaaaacttctaagtaaagctcgtaaggctatacaagattttgatatgatacaagaaaatgataaaattgcggttggactttctggtggaaaagatagtttaactctacttcatatacttaaaagttatcaaagattttctccacaaaactttgaattgatagccataacattaaatactggaggtgttgataattctccactagataaattgtgtaaagaaataaatgttcctttttatgaatttcaaactgacataaaagaaattgtatttgatataagacaagaaaaaaatccttgtgcattatgtgctaatttaagaagaggtgctttgaacgataatgctaaaaaacttggatgtaataaagtagctcttggtcatcataaagatgatgcaattgagacatttttaatgtctatgttttatgagggtagagtaaattgtttttccccaaagacatacctagatagacaggatttaacagttataagacctatgatttacatagaagagtatatgactaagaaaatttcaaaagattctaactatcctattatcacaaatccctgccctgcaaatggtcatactaggagagagtacataaaaaatcttattgctaatttaaataaagagatgcctgattttaaaagaaatgtatttggcgctttaaataattctgagaaattgtttatatgggataaagagaagataaaaaattttaaataataattaaaatttttaaataaaaaagcaagattgtattaattataaataatctttatataatctacacaatcttacttttttatttattatatgttattatctttaatctatattttaatagttcttaatagtatttattttgtctaatacattaattataacttaaatattttatatattaatttaatatattaattcattcaatctactggtttaatccatttttacagtatatacatctacatattataaaaagcaaaattatattttctaaatattttatgttagattataatattaaattctattatctctggtatattaaaaaatctaaatggtaactttgtacttccaagacccgaactcacatataaatgatttccatttatatcataaaaccctttagtatatttcctcccatatggaggagtaactaatgctcccttaataggtaatcttatttgaccaccatgactatgcccagatagaactaaattcattgtatctttactaagcatatctactaaatctggttcatgtgctaacaataaattaaaatttttattatctatctgactctccagatattttatattaggatttccatttaatatttcatcaacacctaatatattaatatatttatcatcttttaattttatttttttattttcatttactaaaagattgaagttggaatttttcataatctgcctataatacctaggaagtttatacatataatcatgattgccaaatactgaaaattttcccaacctagcattcatacttgataaaatagttgtaatttcatctacacttggatttttattggagtaatcaattaaatcaccagtaaatactattatatctggattcaaagtgttaatcttattagctacttttttgagattcttagttgaataaaaactacctatttgagtatctgaaatttgaactacttttacactttcagatttactctcaattgtatcattttttatcaatgctccattttcacttatattatattttttcacaattaatagactcggctctatcgcaactgagtatataaaaatcaaaataaatattaagataaaaaattttaaaaaatacttaatttttgagttcaaaatatctacctacttatttatttttttaaactatttgcattacagactcaactttgttcatttttctgtcatgcatttttggcttatttgctgaaaaccatttatatgttgctgtaagaccttcttttagtaacacatttggtatataaagcccatgttcaataagcttatttatatcaagattaaagtctatatttctaaatgggaaatacgttctttctctaaactctactttttccatatctacatattttattataggttctttgccaataatttctccacatgtatatataaggtcatcccaagaaattaactgtggatttgtcacattataggcctctcttacatgaggatttttcattatgctttccaatacctttaccaaatccccaatatatataaattgattactaacttgttttccttttggtactggtatcttttcatttttttctattttttcaaagaaataatactctctatataaattattattttcaccatatatgtaagttggtctaataattatatatggtatagggctatttataataaaatcttcagcctcttttttatttaacccatattttccccagttttcattttcacctttctcattttcttcttttatatttcttccactatctttatatactgctcctgctgacaatactatatacttttttaagttatccatgcttataaaatcaatcagattacttacatcttcttttgtatatgctgtcatatcatatatgtaatcatattttcttcctgtgataatgttttccatatcttttcgaacttttctatcacaaattagatgttctttaaaaccattataatctatttcctttttaccatttgtaagtatatcaatttgatacccacatttaatcaagcgcttagcaagtgcagaacctatgaagtcgcttccacccataattaaaatagatttcattttaagtgcatcctcctcttttttaaatgacttccttaactataatatcatatttttaaatatgcgacaccattttgtaatatttttgtctataaaagatatttataacaaaatatcttttatagactctacattttcgacaatataagtaggttcactttcactaagctcttcaaaagaaccatacccatacaatactccaatagaatctatacctatttttttagctccaattatgtcatactttctatctccaaccataataactttatctttatcttttacattacataggtctagtacatattgtataacttcatttttattcactcttgtaccatcaagattgctacctgctatatatttaaaatatctatctatatcaaaatatctaagtatagtttctgcaaaaactgttggcttagaagttgctactaataatattttaccatttttatagagcatttctaatatctctttcatattctcataaattttattttcaaatatccctttatcagcaaaatattctctatacttttcaacagcttctttagcttttttatcttcaaatttataatactccttgaaagtatcatgtaatggtggtcctataaattggtctaagttttccaaatcttcttttatgccaaagctatttaaagaatactgaatagactttgttattccttctttagggtctgtaagtgttccatctaaatcgaataatactatttcataattttttttcatatttcagtcctccatatttgtaaaaagtaatatcttacatattaagtttatctattttaaaaagctatagtaatagaaatttctaatactatagcttaagtacccaattaaatcttatatatttattttaaaaataaatttaaacagctctatttaactgttatagctgaaactggacatccttcttcggcttctttacataaatcttgtaaatctgctggtatttctccttcaattgctactgaatgcccttcatcgctcatactaaaaacgtctggacatgttcctatacatgctccacaagctacacatacatccttatcaacaaatgctttcatactaaaatacctcccctaaaattattattttttaattgttgtttccttagatatttatccaatatataccaatttaaacatatatttattattttatcactattgtttagtttattatagtattttcgtatccatgtctataaacttcactgcttttcatccatgattttacagtatattgcaatcttaattttttatttaaaacaagttcattattattgtagtcttttataatatcattacactcctccattgtgaatattgtaaaatcaccttctcctccaatctttattctgcctttatttccatgtaaatcgaaaatctttgttgggtattcagttactttttctatacacttttctagggatatcccaagttccataattttatttataacatttaaaagagaatagtttacgtctttcatgttttttatatgcatatcagtacttattaggtcaggctctaaaccttgctttattgcttttttaaaaactttaaaatcaaattggtccactccatgacatacatcgaacaatactcctctattctttgcatttattactgattttcttaatgtgccagattctttaaggattccatttgtactatttccatatactggtgtaaccacatctccttttcccaaaatattcattacttcatctatatatgatggatactctcctatatataccactaagggtaaatttaattttttagcaacttgctttgatttcttaattatatctataccactttcattagattgaaatttactcgcttttacttttataccctttatcttttctatatttttttctacaattgactcaaccttgtcaaaatttataacatctaaagaagttgattcattcaatatatttagtccctcatttgtaacatttaaaaaagaatatacttctgttttacactcatccatatacttttttttaaaatcatagtagtttgagggaccagctgtacctgcatcaaatataactgtagaacctttttcaattccaattgaatcagaatccatacctgtaggtaattttctcttataacaatgggtgtgaacatctataaatcctggggaaatatacatattatcggcatttattatctcgaactctttatttgtaagtaatttttcttttcttattttctctttaaggttcaatccaatagcatatattttcccatgtaaaaccaagatatctcttttttcaaatttgataccatctgttggagatattattgtcccatttcttataagtaaatttttcatttattccacatcctaattacaatataatttctctaatagcttttcttacataaagaaaataagcctaaaaataaaaatattttagacttattcactatattatactatattaattatattaaattaaataaaatctttaatttactttaagaagcaattaagtatttgttgctcggcttcttcttcagtaagacctaatgtcatcatctttagtatttggtctcctgcaatctttccaatagctgcttcatgtactaaaagagcatctggatgatttgcagcaatttcaggtatagcactaatttgagaatttcccataattattgaatcacattgaacatgtgcagaacaaagggaatccccaataacacaaggattaaacttttgcttagaattatcttgcccaactgtacgagaaactacttgagcagaagagttttcaccctctaagataaccttcatattagattctgcaacttgattaccatgagttaataatttctcaaatacaactattttagctcctttacctaggtttgcatccatttctcttttagttgaatctacacccttaatttgaattgtttccatttcacaatatgaatcctcatccatattgacaatagtaactggatttaaaattctctttccttctccatcaccttcaccataatgtttttctacatattttaggcgagctcctttacgtaagaaaaatctatgtataccattatgttcactatcatcacaaccacagttatgtataccacacccagcaattataacaacatctgcattttctccaatttcaaaatcattatataccatatcctgtacaccagcctctgttactattactggtatatgtacattttctccttttgtatttggctttactataatatctattccaggtttatcagttttaggaattatagttacattttcagttgaatgtctctctactccttgcccatttttacgtatattgtatgctcctaatggagttccacgaagttcagcaactttttctaaaagatttaaatctattttgttcatttaatttgccttcctttctaattaattcatgtctttcattaattcacaacttgaattaacttgacacatgatttcaggtaatatagcctcttttgttccatggctttttactgaaccatcttgtagaacaattatttcatcagctaactctaatattctttcttggtgagaaattatgattatagtctgattagactcttcatgtattttcttaaaactttcattgagttttccaaagctccaaaggtctatccctgcttcaggttcatcaaatatagaaacctttaaatctctagcaaaaagagttgctatctcaattcttttcatttcccctccagaaagagagttatcaacttcacgatttaaatagtcttttgaacacaatccaacatctgtaaggtattggcaacatacatcagtagacaatggttttccatgagcaagtgtaagtaaattttcaactgtcataccttttattcttggtggttgttgaaatgcgtatcctattcctttttttgctctttctgtaatactaagatttgttatatcttctccatctaaaattatctgaccactcgtagctttttcaattcccataataagcttagcaattgtagattttcctccaccatttggacctgtgataacaataagttttcccctctcaaatgaaaggctaacatcatttattattcctagttcctcattgttagactcaacattaaaggaaagattttttatttcaagcataatacccctcttttctataaaatattacattaatatccattcttttattatatcagtaatttttatatatcagcaactctaagcagataaaatgtatattaaataataaaacaaagttattgaaaagtaaaaaagatgagttttatgtaaactcatctcagaaatttagtatatcaacttatatgtatttaaaatttaaccttctatatactctaatattattttttgattatcttttaacataatttcttcttttttagattctattccattcttttttatctttacctcagctacaaaggcatcattaccttcaaccatttctaatagttcatacgcttttttacgacctattttagttgctatatcttttagtactgccattttcttaaacattttatcacctctactcaaaatttacacttaatttttaattatataattctaatcctagactagtttataataattattgtctctaattatatcagatattgagtaaatttaatactttgtaaaattatttatcctctctgactaaataatcatttccatcttggtctttaaaagaaaacatccttccatatggcatctccattaattccccaacttcaacctcgttatttgccatttgttcataagttccattaatatctcttgtacttaaaattattgatggatgagatacatttatctctttgttttgcttcatcattagatttttatcatacaacacaaatgttgtaaattcatttttacttggtgctacttccacccatttcatatttggacccatttccttttcataagttactacaaagttcaatttttctgtccaaaacaactttgcatcctcttgattatttacatagagagttatttttcctattttatttatcataacaatacccacctttattattaaataaatacctaatattttttatatttaataatatacccatatatattattttctatagatatatatttctaatatttatcgccaaattatgtaattctgctcaatatataatttataatatccatactattatagcctttatttatgtaatttaataaccttatatatcatacttataattatgataataactacataaaaaatcacttctaaatagagttatccatctaaaagtgatttcatatattctatgcaactttgtgttttagccactttgttcctcttaatcttaaacaatataaagtccctctaacaagccaatcagtatacatacctatccaaattcctaacactccaaattctaatacaacccccaatacgtaacctgtaaaaattctaaaaatccacatacctattactgcagtcatcattgtatatctagtatcaccggctccctttagccctgctgataatacaaaggatataggccatattaccatagctaaacaatcacttcgaattaattgtgttgagatgtcaattacactagcattttgagtatacatacttgaaatccagggtgcaattggtataaatatagctcctactataaataaacaaattgttgcaaatttagttaaatataataaagtactcttagctcctttaatatctccacgtcctatatactgtcccaccaaagttgtagcagacaaagctaaagcattcccaattacatttattatggatgcaattgacattcctattgcattggatgcaattgctgatgttcccatagtaactataaatacttgaacaatcaatttacctgcattaaaaagtagttgttcaactccagctggtatccctatattaaatatagacttttgagtttcaacatcaatcttaaatggaaatattttacccatagatataaattcatttcctttaaataaagctcttataattactatacatccaattattctagctatagcaatagatatagctgcacctgttatgccataggatggtgtttgcaaatttattcctagaggatttaaatcaataccatatataagtatatatcctaatgttacatttactatattcataaacatagtcacatacataggtttctttacatctccacaccctcttaaaataccatttgctatttgttgtgtcgcaataaatggatacgtaaataatgtaaactctatgtataattttgcatttgattttaccaattcttctgctgaaccataaaataaattaattacaccagttctaaaaacccacatcaatattgttattgtaaaggataatattactccagacactagagcctgcttaatagtttcattcaccttttcactatctttttttcctatttgttgagctacaacgacagtagctccaacagataatgcagcaaatacagatataaatatattgtttattgaatcaaccattccaactgcagatacagcttcttccccaatatgacctgccattattgtattaaatactcctaaaagcatgacaaacgtctgctctatcattataggaattgctaactttataacatttttccttataaacatccctattcctcttttccctctttatataaatttaatttttaattagtttatcgaactgtaaattgacaatgcaaagtttagaattgtattgttcgcattataatatactgctttcaaataatataaatcttgtttaatatcatttgaacacagtatatctttataattatcttatgtttattattttttatggataccacatttaaaatatttattaatttaatataaatattttccgttattattaaaagtagctatatttcgttaatattgtatcactatcgtgtagcaataacaataagtacattttatatattttttataatattatttaatcatccaaacttttaccactttttcaatatataaaatattacactttagatgtaacaaaatcgcatccatttaaatattgtattttatagactaattttaggatgtgatactttggttaatttaaatgcaaataatctaaatgtaaatatggtttatcctatttcttccacagcacccatacgtttcagaagatatactgtttcatatttagaaaacatggaaaatatttatttaactatagcaacatactttgatacacttggtttaggcacaatgaatatcgacaaagtttatggtcaatgggcttggtttactgataatatatatgatttaaatctatttgtttttgtaggaaattatccttatcaaattgctaaaaacagatatgatacatttgtagatattttgccagtagctattacttctattgtcaatggagatagagtatttttaatttcaaatccttgtttgttaaattcaaaaattacagttagatttatatctagtcatcctactcttaatagaacagttgattatggcaatattagagattttattttttaaaactgcaacatgatgtgctattaaaaaataccctaaatttaatgatattattaaataactagaatatttttaattggcacatcatgcctagctattataaattcataatattattttacttaagataagtactgtattttatctacttgtatatttttatttacctagtttctcagttctatatcctatttctttattagctagcttataaccttcttgtatcatttcttctctcgttaatgcactccctaataaattgtcaatactcagttgctctctatcactaaaatacttatccaataatgattcctctatatcttcctgatatgccaaatttccttcatgcattatatattttacatcgaaaccttctttatttaatacttttcccaccaaaatacttctatgacatcttataggttcttgcatagctcctaataaaactatcctataacccatttgacaacccttttttaatctttctattccgtttaaaaaaatatcttcttttgctactttctcaaaatctgcataaccttcttgcgtatatacatctttattatttcttttagctccaaattcttttcccatgtatatatatataaatccggaatttctaagagattcgttaaatgcctctttattgtattgaatattatatttagaatatggagtttctctaatgtcaactacacaatttatgtcatatttttttatcatattaataagcttatcatatggataatttgaatgtcctattgcgaatatttccatataaataccctcctattctttgaaattagtatctatatatgtagatacccgatttacttaaaattaaataaagtattactttaaatacccaatatctttttttcttgatactgtatatttttttactttatatccttaaaaaaatatacaactttatatataaaacatcaatatttatatatattttgtatattaaatacaattatttataaaatctttgataaaaatttataaatagagcatctttagaaaactattaacagaaaaacacactaaaaatttgattatccgctaaaacactgtatctatcggcattatcaaggagctaaacacatcaaaatactactaatttactacgattgaatgagccttgatacgtcctatttcccagatatgcaaagatacggtacagcacatcagtattgaaacaagaaaaattgaatacttcatagactacggaacgcacaatatcagcgttccttttctatttccagccgttcctagtggacggctattttactaccaaaatgaaaggagcatttagaattatgaaaaagatattaaaacgattgtgtacaggctttcttgcctttgcaactgtcgttaccgctttaccgagttcaacggttcatgcgtctaatacacagtattggacggaaagtaaagagcgtgtcagtatcgtagaacaagtaatgaatgacggttctatcagttctacctttaatgagggacatttaaccgttgagggtgaggacgcttattgtatcgacatcaacacagcctttaaaaacggctataagaccaaagctgacgcaagtacccgtatgagtgccgaccagatagctgacgtcgccttatctattgagtatgtgaaacagtacacagacatccacagcggaataagcagtaaacacgcctacctattaagacagcttgttgtctggcagagattaagtgttcagcctgactggcaatgggataatgtgcgagcttcctatgatgaaatcccaaaagccgtacaagatgaagtattcgcaggagcaaaagcctttgtgaaagaaaacaaaggacgttatgactgtggcggatatatctactctggcgagggtcaagagttagggcaattctgggcgaagttagctgtcggaaataccaaacttcaaaagacttccaccaatgccaatattacagacggcaacgggatttattcaatcgctggtgcaacatacggtgtgtattctgataaagactgcacgaaacagcttaccacccttacgactgatactagcggaaatacagaagccgttgaagtaagagccactatagtatatatcaaggaactttctgcaccagcaggatttaaaattgataaaacagtttactctttatctgtggaagttggaaaaacagcgactttaaaagtatctgatacaccaaaagtaacagataccttgattgagctattcaagattgacatggaaacacagaaatccaatccgcagggaaacgcttctttagagggagcagagtttacatggaacttctacgctggatattacaacaaaaacaatcttccagcacagcctacaagaacatgggtaacaaagactatcgctgaaaaagacagcgacggtgctatccattacattactcgtttagctgacaaatataaagtatcttgggacagcttctatacgcaggacggtaaaaacgtacttccattaggaacactaactgttgaggaaacaaaaagtccgtcgggttacttgttagagggtacatatatgcaggctgacggtagcgaagaacagataaaaggaatgtatctgacacagattacagaggacggcgaccttgccgtattatctggaagcaatcaataccatgtttctgataaagtcattcgtggcggtgtgaaaatccagaaacgagatttagaaaccaaagacacgaaagctcaaggcggtgcgactttgaaagataccgcctttgaaatcatttccttaaatgagaatgccgtcttagttgagggcaagttatacaagaaaaatgaagtgttaaagacaatccataccgacattgagggtatcgcttctacttctgctgacctattaccttacggaaaatacagattgtctgaacaaaaaccgccagagggatatttgactgacggtgcaaagccgattgattttgaaatcacagaaaatggaaaaatcgttgatttgactgacgaagcccactctatctataaccagattaaacgtggcgatattgagggcgtaaaaattggtgcaggttcgcacaagcgtcttgcagatgttccgtttaggatcacaagcaagacgacgggcgaaagtcatgttgttgtaactgatgataacggacaattctctactgcttctgattgggcttcccacaagcacaataccaatgcaggaaaaacaagcgaggacggtgtgtggtttggtacttctgaaccagacgacagcaaaggtgcgttgctttatgatacttacatcattgaagaattacgttgtgaaagcaacaaaggtttcaaacttattccaccgtttgagattgtcatttccagaaataaggttgtggttgatttaggtacgctgactgatgaatacgaaaaagaaatcactatccatactactgctaccagcaaggacggcgaaaagactattcttgctgggaaagacgtaactatcactgatacagttaaattagacggtcttaccaaagggacaaaatatcagttgaaaggctggcagatgttaaaagaagaaaatgcagagcttatcatcaatgacaagcgtattgagaatgactacatctttacggctgacagcgaaactatggaagttaaaatcgagtttacctttgacgcttccaatcttggcggtaaacagcttgtaacttttgaggaattatacgatttaagcaatccagacgaacctatcaaagttgcggaacacaaggacattgaggacgacggacagacagttactatcaaggaagtaccagaaacacctaccccagaagaaccagagaagccaaccacaccagatacacctacgaaaacagacagtcccaaaacgggcgacaatacaaatatccttgcctttgcaattatgatgtttgtttctgctggtgggctggctggtacatactttttcaaacaccgtaagatgaagaaatcataaggcggtagctgtatgagaaaagaaaaatcacgctctccgccatagcttagataggcagactatacctattctggcttgtctgccgattacctgcaagaacacggatagtcaagggtgcgttagcatttatttaccctttactatctgggggcttgctggcactttcctaaatgccagaatacacacatcaatcaaacttaaagtaagaaacgaggtaaaataatatggaattaaaatatatcgtgccgaatgtggcacagacttttggaaacttggaatttgcaggggaaaacaaagtagaccagcaacgtatcaatgggcgttacactctcgtatcaagaagttacaacttgtattcggatattcagagagccgacgacattatcgttgtattgcctgcaaaagctggcgagaagcattttaagccagagcagaaagtaaaactgattaacccacgcattaccgcagagggttacaacgtcaaaggacgtggatttacaaactacattttaatggctgatgatatgttaccagcagaaagcaaataagggggtatttgattatgagattaacaaatggaattgtattagataacgaaaaaacttttggagtattgaaattctctgcacttcgacatgaggtgcgtgtagaaaatgaggacggaacgacaagtgatgaaattaagcgtcgtacttatgatttgaaatgtagtgtgcaggaacgcatgatacaagtgtcaatccccgctgatgttcccgtaaaggactttccttataatgcggaagtggagttaatcaatcccgtagctgatacggtggcaaatgccaactttagagggactacggttgattggtacatcaaagctgatgatattgtattgaagaacaaaggcggtcaagctggaaatccgcagaacaacgctccgcagggacagcagaaaaagtaagctgacaaactagtttttcattgtaggagatataaacaactgttataatatggatgtggaaacagttaatttagacttataaaggagaaatgtgtatgctagataaaatacctaatgcagaggaaatgactgctttggtcggacaatcattatatagtgtatggaatgaattgtgtgccttgattgatgaaaagtatgaaatggaatgtctatggaataaaggtggcaaagcatggaattatgaatataagtatcgtcgaggtggcaaaacattatgtgccttatatgctagagaaaattgtgtgggatttatgattatcttaggtaaagatgaacggttaaaattcgatacatatagagataattattcaaaagaagttcagagaatttatgatgaaacaaaaacttaccatgacggaaaatggctgatgtttgagccaacagatacaactttgtttgacgattttgttaaacttttgaggataaaaagaaaaccaaatagaaagtagtttattaccacaccattagcaaatggatagtttcttataatagcggatatatgaaaatgctgtcatgtggacataaagaaaattggaagttgtggaggtagcaaaaatgaaattaaaaaaccctatgttggtagtaactgatatagataaatcagttgagttttataaaaaggtttttggactttatgtcattatggattttggggcaaataaaactttaacaggtggattagccttacagacaagtgaaacatacaaagagtttatcggtacaagtgatatttcttttggtggtaacaattttgaagtctattttgaagaagaagattttgataaatttgctgataggctgaaagaatatgatattgaatatgtccaccctattatagaacattcatggggacagcgtgtagtccgcttttatgacccagataaacatattatcgaagttggagaaaacatgaagatagtgtgcaagcgtttcttaaatagtggaatgacaccagaacaagttgcagaacgtatggatgtacctatgaaatttataaatgcttgtatgcgataaattgaaagttaggagactaatactatgaaaggatttgaacgcaaaaatcaattattttctctttgcggattgaattgcggactatgccctatgcttttgggaaattactgtggcggttgtggcaatggtaatcaatcatgcagaattgcaaaatgtagtcttgaacatggacagattgaatattgctatgaatgcaaacaatatccatgcgaaaaatatcaacacattgatgattatgattctttcatcacgcataaacggcgaaaagcagatttagaaagagcaaaaaacataggcattgagcaatataatcttgaacagcaggaaaaaacacaaattctttcttacttactttctaactataatgacgggcgtagaaagactttcttttgtgtggcagtcaatttattagaactttcagaattacaagaagcaatgaaacaaatacaatccaatgacgaattgaccttactaccatttaaggcacaatgcttgtatgtggtggaggtgtttcagaagattgctgaaaggagaaatataaaactgaaacttttcaagaaaaagtgattttcaaatttgaaattgtaacaaagattatttatatgacgaatgggggaatacctttggaaacagtagagttaagatttcaatatactcaaagtgaatatataaaagcagaaaggcaatatttaatttctagtaaaactatacataaatatgatattgctttagtcgctgtatttttgttgctgtcagtcgtttatatgctgttctcctcttttagcgtatttagtattttaatatttggattgataattgttgtaactgcattgggaagctatttatatatcctaatgcctatactgaaattcaaacaaactgcaaaatatcatgaggaatatacgctggtattttctaaggaaaacattaaatttaaaacacaaagcattgactcagaagtgaagtgggacatttactctgcactatgggaaagccatgatttttattacttaattcaagcaccacgattatatacgttaattcccaaaagaatttttaaagacctaaacgaaaaacagctatttgaagaaattgcacaatcaagagttaaaacaacaaagcatatataatgaacataccctacaatgtaacaacttcatattcatacacacaaagcggttagtcttttaagattgactgcttttttcatacttaaattaagattggagtgattgatttatgcgaatgattttgaataaaggacaccgtatcagagccagagacaagaaccttgtctaccacttttccatagggacgcttctgtttgtatttgtggcggttctcctgctactgaatatcaaacagctcatgcgtaccgactgggaacatttcagcttattggacaatggcttgacgctttccccctacaacttcataaccatattgatagcgactggtatttgtgcattggtcgcttttctgtattaccgcttctgttatgacagtttcaaaaagctcctgcaccgtcaaaagctggcacgaatgatactggaaaacaagtggtatgaagcagataccgtacaagacagcggtttttttactgacctgcaaagcagatcaagggaaaaaatcgtctggtttccaaagatttattatcaaatggaaaacggattgcttcatattcactgtgaaatcacattaggaaaatatcaagaccagcttttgcgattagaggataagctggaaagcggtttgtactgtgagctgaccgacaagaccttgcatgacggctatattgagtacacgcttttatatgacatgatagcgaaccgtatttccattgacgaagtgaaagcagaaaacggctgtcttaggctgatgaaaaatcttgtctgggaatatgacgtactccctcacgctctgatagctggtgggactggtggcggtaagacctactttctgctgacgcttattgaagctctgctacatacgaatgctgtcctttacatcttagacccaaagaacgctgaccttgcagacttaggtacagttatgggaaatgtgtatcataccaaagaagatatgattgattgtgtcaatgccttttatgagggcatggtacaaagaagcgaagaaatgaagcaacacccagactataaaacgggcgaaaactacgcctatcttggtttaccgccctgctttcttatctttgatgaatatgtggcgttttttgaaatgctggggacaaaggaaagcgtaagtttacttagccagttaaagaaaatcgttatgttgggacgacaagctggatatttccttattgttgcctgccagcgtccagacgcaaaatatttctcggacggtatcagagataatttcaatttccgtgttggattggggcgtatcagcgaattgggttacggtatgctctttggttctgatgtgaaaaaacagtttttccagaagcgtatcaaggggcgtggctattgtgatgtgggaacaagtgtcataagtgagttttacacgcctttagtcccgaaaggacatgattttttgcagaccataggctctcttgcattcgtaaggcaggacgggacggcgacgtgcgaagcgaaaggcgacggcacggactagccgttgctggtgtggcgttagccacgccagcagatataagcccctcattatctaacagaggggcacaattacgctggaaactggttcaaaaaccttgaaaagtccgctaggaataaggattttcttagtttttagctagttgtgataatcacttgaaaatatcacaaaatcacaacaatatcacgattgggggtatgacaactgaatgatactgattttctgaacaccttgaaagcaaaacgcagtgattatggcgtatcgcagacaaggcttgcaatcatggctggtatcagccgtgaacatctaagccgtatcgaagctgggaaggtagcactgaccgaggatatgaagcacaaactactggaagcggtggaaaaattcaatcccgacgctcccatgttcctgctctttgattatgtgcgtatccgatttcccacgctggatatacagcacgttatcaaggacattctaaagctgaatatagattatatgcttcacgaagatttcgggcattacaagtacaccgagcattactatatcggggacgtgttcgtttacacttcacaagacaaggaaaaaggtgtcctgctggaactgaaaggaaaaggctgtcgtcagtttgaaagctatctgctggcacaggaaagaagctggtatgacttcctcatggacgcattagttgatggcggtgtgatgaagcgtatcgacctagctatcaacgacagaacgggcttactggatattccagaactgatagagaaatgcaagaacgaggaatgtatttctaaattccgtagcttcaagaactatggttctggggagctggtaaagcacaacgaagccaacaaggacggcatgggacatacgctttacattggttcatttaccagtgaagtgtacttctgtgtctatgaaaagaattatgaacaatcctcaaaattagggataccgattgaggaagtccccattaaaaaccgatttgagatacgtttgaaaaatgagcacgcctactatgccattagagagctgctgacccactacgacgcagagctgacggcattttctattatcaaccagtatatccgctttgccgataaggaagccaacaagcgaaaaagcgactggaaaaccaacgcccgctggtcttggttcattggcgagggacgaccgcccgtgaagctgacgacaaagccagagccttacactctgcaaaggacgctgaactggttacaaagacaggttgcaccgaccttgaaaatgctgaaacagatagacgctggcaatcagatggactatctcaagaccattgaacagcaggcaaagctgacagataagcacaagcagataatcagacagcagacggcttcggtggacgaactgatagaaaaagaaaaggagtgattgatgatgtgggaattgattaaggacttactgctggtatcacttggcatgggtatcggcgtggttctgatgtgtattatgagtgtcggaaaggaagctgaccgacacatgattgaattaaaagaaagcgaggaaaaataaatgaatttcgggcaaaatttatatacatggtttttaagcaacgcccagagcttagtgcttatggcgattgtggttattggtatctacttagggtttaaacgtgagttttcaaaacttatcggcttcttggtggttgccttagttgctgttggattggtattcaatgcaggcggtgtcaaagacgtactcttagaactattcaataagattatcggcgcatagccgtactttttcattatggtttgcggatacgcaaacatacctttcccactttgggagtgggctaaggggaaagggggtaacggaatggtacacagataaaaatacagcataatgaatttcattgcttggctcaaacatagttgatataataaagatatgaaaataataaacgaaagtttttttgataaggagtgatattgtgaaattgtgtattgttttatctccatataaggcttaatggaatagacttgtatggagtgaaatgttatccagagagccttacattttatcaaatttcaaaatgtaaaggagaatgggcatggaatataaatatacaaaaattgatttgaataaatggaatagaggtaaattgtttcaaagctacattgataatatgcgtattgttatgagcttaaccgtagatattgatgtaacaaagtttattgaattttcaaagaagcatgatttaaaattttatccagctatgatatgggctgtttcaaaggttgttaatgaacatgatgagttcaaatatagttgggataataatgggaatttaattaagtgggattatatttctccgtcctatactgaatttcataaagaagatgaaaatttcacaaagatagttacagatttttctgatagcatatttgaatttcataaacgttttatattagatagggagaagtataaaacagaacgtgcatttgtggaaaatcaatctttgaacttttttgatgtatcttgtttaccgtgggtaaaatataatcattttgatgttcatgtttttgacgagggaaaatttcttgcaccagttattacttggggcaaatatgaattagagcaagaaagatatataatgcctcttacaatgaatatacatcatgccgtagcagatggattccatttatccagattttttaatgaagtacaagaattgataaactcaatttaacagctatatacaaagcagttagtctatacgattgactgctttttttcatacctaaatttaagattggagtgattgcttgaaagatatattttcggatatgcaggcaagtatcggctgtacctacatttcagatttaccacatcataaacgtatggtgtggcaggaaatgaagcgactgaaccttgccgattatccgcagaaacaattagaagattttgcaggctatgtctttggtgtcccttacactagcatagctgaagcatgaaagaaaggacgtgaaaacctatgaatgaaatgcgtgtctgtatcgaaagccgactacacacttctgaagaaatccgttccgcatggttcacacttcccattgacgaggaagaactggaagaacagataggcgttcctatcgacagtgaagattaccatatcgttgaaaaggaactgccctttgctgatgaagtcggcgaagatgcgaccattgaaaaactgaatgacctttaccatacctttgaaagtctgcctgccgatttacaagaggactacggggagctgatgtgttactttaccagccttgacgaactgcaccagcaccgccatgatgtgatacattattcatggtgtaaaaacatggctgatgtggcaaggcatttgttggacaatgaccctgctttttctgccatcgaggaacgcctgacccgttactttgattatgaagcctacggacagtatcttgatgataacggagaatttatagaaacagaccacggtatctatgaactgccgtagaagtgaggtgtttctatggtagaggatatgcgtgtatatatcgctaatcttgggaaatacaatgaggggtatctggtcggcgactggttctcttttccgattgacgaagaagatgttgccgagcgtatcggcttgaatgaacggtacgaagaatacgccgtacatgatacggaaaactttcccattgagattggcgaatatatctcgattgaagagctcaatgaaatgtatgaaatgatatgtgagcttcccgactacatcacggacagtttggacgaatttgtatcaaattatggaagtttggaggaactgtacgaccatagggacgatatgattttatacgctggctgtgaggatatgaccgacgttgcctattacttcattgatgaattgcaggcacttggcgatattccccctagtttgcagaactatattgactatgaagcatacggcagggatttatcctttgagggaacttttattgaaacaagatacggtatgtgtgagataccgtggtaagaagctggaagatcagcgacaagcattgttgcttctgacagctttttctattggggacagtctgaaaaacggctgtccttttctattatacgaaaggagttgaaacaaaaacgtgaaaaagattaaaagctacacgggtatctggaacgtggaaaaagtcttgtatgcaatcaatgactttaacctgccctttcctgttacctttacacagattacatggtttgtgataaccgagtttatcatcattctgtttggggacttaccgcccttatccatgattgagggggcatttttaaaatacttcggtattcccgtagctcttacatggttcatgtcgcaaaagacctttgacggcaagaagccgtacagctttttgaaatcacagataacctttgccctacgaccaaagattacttatgcaggaaaagccgtgaaactggataagcaggtactacatgaagctattacggcagtaaggagtgtgagctatgttcccgattaaatatatcgacaacaaccttgtctggaacaaggacaatgaggtgttcgcctactatgagctgataccttacaattacagttttctatccgctgaacagaaattcattgtgcatgacagcttccgacagctaatcgcacaatcccgtgagggcaagatacacgctttgcagattgccacagaaagctcaagccgaagcatacaagaacagtcaaagaagctggttacgggacgactaaaagacgttgcctatcagaagatagacgaacagaccgaagcgttagtatctatgattggggacaatcaagtggactaccgcttttttcttggcttcaagctcatggtaacagaccagagcatgaacctaaagagcgtgaagcaatcggcgtttctcacattcaaggagtttatccatgaagtgaaccacacgctgatgaatgactttgtttccatgccaaatgatgaaatcaaccgctacatgaaaatggaaaagctgttggaaaataaaataagccgacgcttcaaagtaagacgcttagataaaaatgacttcggctatctgattgaacacatctacggcagggacggtgtcgcctatgaagattatgagtatagcttaccgaagaagaaactgaaaaaggaaacgctgataacgcattatgacttgatacgtccgacccgttgccttgtggaagaaagccagcgacatttacgcttggaacatgaggacagcgaaagctacgtttcctactttactgtcaatgcgattgtcggcgagcttgattttccgtccagtgaaatcttctatttccagcaacagcagtttacttttcccgttgataccagcatgaatgtagaaatcgtggaaaaccgaaaagcgttatcgacggttcgcaacaagaaaaaagagctgaaagatttagacaatcatgcataccagtctggcagtgaaaccagctcaaatgtggtagacgcattagacagtgtggacgagctggaaacggatttagaccagtccagagaaagtatgtataagctctcttatgttatccgtgtatctgctccagaccttgacgagttgaaaagacgctgtgatgaagtcaaagacttctacgacgatttgaacgtcaagctggtacgccctgctggcgatatgctggggcttcactctgaatttcttcctgccagcaagcgatacatcaacgattatgtgcagtatgtcaaaagtgattttctagctgggctgggctttggtgcgacacagcagttaggggaaaacacgggtatctatatcggctattctgtcgatacgggacgcaatgtttatctacaaccgtcccttgccagtcaaggcgtaaaagatacggttactaatgctcttgcttctgcctttgtagaaagtcttggcggtggaaaatcattctgtaacaacctgcttgtctactactctgtgctgtttggcggtcaagcggtaatcttagacccaaaatccgagcgtggcaactggaaagaaacgctcccagaaatcgcccatgaaatcaatatcgtgaaccttaccagcgacagagaaaatgcagggcttcttgacccgttcgtgattatgcagaatgtgaaagacgctgaaagtctggcaatcgacatactcacattccttacgggcatttcttcaagggacggcgagaagttccccgtacttagaaaggcagtgcgtgccgttacccagagcgaccagcgaggattgctccatgtgattgaggaattaagaaaagaagatacacctatctcttgcaatattgccgaccatatcgacagcttcacggactacgactttgcacatctgctgttctcggacggtacggtgcaaaatgcaatcagcttagacaaccagctcaatatcattcaagtagccgacttagtgctacccgataaggacacgacctttgaattactgtccgtttccatgctgattgtgattagtacctttgcgttagattttatccactcggatagaagtgttttcaagattgtagaccttgacgaagcatgggcgttcttaaatgtggcacaaggcgaaacgctctctaacaagctggttcgtgctggacgtgccatgaacgcaggcgtttattttgttacacagtcctctggcgacgtgtcaaaggaaagtctgaaaaacaatatcggtttgaaatttgcctttagaagcaccgatattaacgaaataaaacagacccttgaatttttcagcattgacaaagaggacgagaacaaccagaagcgattgcgtgatttggaaaacgggcaatgcttgcttcaagatttatacggacgtgtgggcgtggtgcagatacacccagtctttgaagaattactgcacgcctttgataccagaccgccgatacagcgaaatgaggtggagtgatgaaagaaaggataaaaagtgtgttcacaagaaaaaagatattccgctttctcaaaatggctctgtttgtcgtggcactttcccttatcctgctttcacttttgggaacggtggcacacgcaacgggacttgtggacgacactatcaacaccgagaacctttattccaaatatccgctgtcgaattatcagcttgatttctatgcagataataactgggcgtggttgccgtggaactggctggacgggattggaaaaagtgtgcaatatgggctttactgtattaccaactttgtctggacgataagactatatctaagcaatgcaacgggctatgtagtgcaggaagcctacaagctggactttatcaacgatatggcagacagtatcggaagaagcatacagacccttgcaggcgtaactcaaaatggtttttctacttcgggcttttatgtgggatttcttctgctgattatcttagtcgtaggtatctatgttgcctatacgggactgataaaacgggaaaccagtaaggcactacacgccgttatcaactttgttgtggtgttcgtattatcggcttcttttatcgcctatgctcctgactacatcaagaaagtgaatgacttttcatcagacatcagtaccgcttcactggacttgggaacaaaaatcatgcttcccgacagcgacagcaagggcaaggacagcgtggacttgataagggatagcctattttccatacaagtacaacagccgtggctactgcttcaatttggtaattcgggtatagaggaaatcggggcagaccgtgtcgaagctctcgtatcggcaagcccagaggacgaggacggcaagaccagagaggaagtcgtgaaaacagaaatcgaggacaacgacaacaacaatctgacgatactgcaggtggtaaaccgtttaggtatggtgttcttcctcttgttcttcaacttgggtatcacgatatttgtattcttgcttacgggtatgatgttgttcagccagatactttttatcattttcgctatgtttctgcctatcagctttctattaagtatgataccgagctatgagagcatggcaaaacaagccatagtccgtgtgtttaatacgattatgacaagggcaggtattacactgattgtcacggtagcctttagtatttccagtatgttctacaacatatcgacggactacccgttctttatggtggcgttcttgcagatagtgtattttgcaggtatctacatgaagctgggcgatttaatgagcatgttctctttaaacgctggcgacagtcaaagcatgggacggcgaatattccgcagaccgtatctgttcatgcgacatagggctagacgtatggaacataggcttgcaagagctgttagtgctggtggtgtcgctggtgtggtggctggtggtgtcgttgccagttcaaaatctacacgccagaatggaacaaagaacaatcgtggaaatacaagctccagcatggggcagaaagcaggttcagccgtgggagctgtccttgatacaaagaataaggtcaaggacaaggcaactgctgtcaaagaaaatatcaaagatatgccgacacagactgcctatgcggttcactctgctaaggaaaaggcgaagtccagtgtgtctgatttcaagcgtggcgtggtgcaggaaaaggaaaaccgccagtctggacgcttaaagaagcaacagctacatagacagaatatcgctgacaagcgtatggaacttcaaaaggcacaagaatcaaggcaggcaggtaagaaaacggacggatcagcgacaagcggagctacccgtccccatgaaagaccagctaccacttctaaggttaatgtagaaaaacagcaggaagtcaaacgccctgccatagcttcaaccgtgaagaatgatgaacctatcaagaaaaatgttgtcaaggaacgtccactatcttctggcgatacatcagcaaagaccgtcaatcaagaaaccacaagacagaattacaagactgaccgtgttacgaaaacaaccgttcagaagcatacacagcagaataccgagaagaacaaacgaaccgtattcaagaaaggacaaaagaagaaatgaaactaagacatatcgctattgttggcagtctgttttctatcctcttttctctcgtattattctttggggttctgattagtgccgaggacgacgacgggggcaatggttattcctctaattatgtaggtatgaacctatctgccgaagtcttgaaacatcagcctatggtagaaaagtatgccaaagaaaacggtatttccgagtatgtcaatgtgttgctggtaatcatacaagtggaaagtggcggtacagccgaggacgttatgcaaagctctgaaagtctgggactaccacccaactcactagatacggaaagctcaatcaagcaggggtgtaaatattttgcgtccctgctttcttcctgcaaaaatcaaggtatcagtgatataaatgttgtgatacagtcctataactatggcggtggctatgttggctatgtggcaggaaacggaaaaaagcatatgttcaaccttgcggaaaacttcgcaagggataagtcgggcggtcaaaaagtaacctatacgaaccctatcgccgtggcaaaaaatggtggctggcgttatggctatggaaatatgttctatgtggagcttgtgaaccagtaccttgttgtcaatcaagtatcgggcgagctggcacaaaaggttatgaatgaagccttaaaatatcaaggttggaagtatgtatatggtggcagtaacccgaacacttcttttgattgttcgggactggtacagtggtgctacaacaaagctggcgtatctttaccgagaaccgcacaaaatcagtatgacgcaacccagcatatcccactatcgcaggcaaaggcaggcgatttggtctttttccacagtacctacaatgcaggaagctatgtaacccacgtcggtatctatgtaggaaacactcagatgtatcatgcaggcgaccctatcggatatgccgatttaaacaatgcttattggcaacagtacttgatttgtgctggaagaataaaacagtagaaaggattggaaaccatgtttaaaaagaaagaaaaaccagtaaaagaaacgaaagtccgcactatgaaagtaggcacacataagaaatctgtgattgctctgtgggtggtgcttatcgccagcgtatcatttggcgtgtataagaactttaccgccattgatatgcacacggtacatgaaacggaaaccattcagttaagactaaatgacaccaacggagttgaaaattttgtgaagaacttctgtaagtcctactacacatgggacaacagcaaggaagctatcgaagcaaggacgcaggcaatcagcaactatctgacaaaggagttgcaggacttgaaccttgataccattaggacggatataccgacaagctccactgttacaaatgtactgatttgggatataaaacagtctggaacgaacgattttatcgctacctacgaagtagatcagcagataaaagagggagaacagacaagcaatgtcaaagcaacctataccgtcaaagtccatgtggataaagacggcgatatggttatcgtacagaacccaaccattgcaccagcgattgaaaaatcagactatgagccaaaggcacaagaagccgacgcaagcgtggacgcagataccgtcaatgacgctaccgcatttttggaaactttctttaagctgtatccgacagcaacagaaaaagaacttgcctactatgtggctggcaatgtgcttgaacctatcggcagggactacctctattccgaattagtcaatcctatgtttacggatgacagggataatgtgaaagtcagggttgcggtgaaattcattgataatcagacaaaggcaatgcaggtatcacagtttgagcttgtgttacataaggatagcaactggaaaattattatgtaagatattttgttggcaggctctattttcggatatagtctgccttttctatagcaaatgtgctgcactaacaagcgatttcattgtattttaagcaattaaatctttcttgacaattttatcttaaatcatatatttatggatattgactttctgcttgcaataagttataatatgactataaaactaaattagtcatataggaggcgtgtggtatgtataaagaagttggtatttcttcaaataatgttccgataacactttctatttggtatacagaaagaaatagtcctaccattgtttttttgccgggtactatgtcacaccctctcatgtatgagaattttctatgtggtttgagtgaaagaggatttaatataataggcattcactatctttcacacggaaaaagccctaaaatcaaaaaaaattatacaatggaagatttgctgcataatgtatatgacgcaacgacttacggaatagaaaattttggtgaaaacatagctgtcatgggttccagtcaaggtgggattttagctgcaatggcggcgggtagggacacaaggttaaaagccgtttttccacataatatcatgctgactacattaaaagaaactatgagcttaacaaaataccccgcatggtcacaccgttttatggggctgatacagttgggctttcgtgtaggtggaaaattgctgcctaactataaggttccaggagacgcttatttagactatgacagagtattttatagtgaacaggcaaaacaagattgcttaaatgaccctatgcttttaccctattatcctttaagatttgtcgccagcttatttaatgctgacttatcgtgcttggagaatggggctatacaatgtcctgttattttaattactgccaaaggcgatccgctttttagatttgattataccaacaaagtatttgatttaattcatgtaccgaaaaaggaattacttactttagagcttaatcgtcacatgatttttaatgaggacacggacactacaataaacgcattggaagctaccttgcataaatatcttggatagtatattgattatataatcagtaaatgttatacttttcatgacgataaaaacattttagtcataagggggttatgagtttgccacgatttacggaacaagaaaaagaaatcataaacagtaaacttttgatagagggagaaaagctgttttcattatacggcttaaaaaaagtaacagttgatgatttagcagctgctgtaaacatatcaaaaggttcattctatgctttttatcccagtaaagaacatctatatgtggaaatcaattttcgcttacaaaaagagttatttacaagtatagaaacaactgttaaaaagaaaaagtataagaaccatagagatttagcaaaggacgttattatgctaagtttaacgggggtgattacttcgcctattctttcacagattgatttatctttaatggactatctgcaaagaaaaatatcgtcagatatttttgaaaatcatatgtacagtgatattcgtatattggagatactggaaggtttaggggttgtatttttggttccgcatacggttatcataaaatccctgtattctgttttatcctgtttggaacaattcaaagaggacgaagaattgaatatggtacaaaatcttttagtgaatggtattattcagcaagtagtagcagagtaataattttgtttggttatttgacaggcaagtggccaaacaaattttttacagtttatatgactatatatctataaacgtcataaagttaaaggaggaaagaataatgattgatgtaaaaaaactgtattttagttatactgacaaaccgtttgttgagaatgtaagtttccatgttgggagaggagaaattttcggttttttaggaccctctggtgctggaaaatcaactattcaaaaaattttaactgggcttaatacaagttataaaggcagcgtaaaagttgcaggtacagaaataagggagcatacaaaccggttttatgaaaatattggagtagactttgaattttcaacctgctacgagaaattcacagcacgacaaaatctcgcctattttgcttctctatatgacaagcaacctcggtctattgatgaattattgcatatggtaggcttagaaaatgatggggacaaaaaagttgctgacttttccaaaggtatgcgttctcgcttgaatttcattaaagcgttagtacatgaccctgatatattattccttgatgaacctacaagcggtcttgaccctacaaataatcgtttaatgaaagatattattcttgcggaaaagaaacgcggaaaaacgattatcattactactcacaatatgtatgacgcaacagagctatgtgaccaagtagcctttattgttgccggaaaagtcagtgcattggatagtccacataatttgattatgtcaaggggagctgccaaaatacactatacctactatgataaaggcgagaaaaccggagaatgtctgcttgatagaaccacagaagataagttgttaaaaagtttaatttccgaaaaccgtctgctttctattcatagtagtgagcctacattaaatgatatttttgttgatattacagggaggacacttcaatgagattgggacgtttaatttgtggtgatatacatttccaatggaaatatggtttctattttatctactttatattaacagttttatatgtgtgtgggattgccgctttgacgggacattggaaaacggatattgcttctatcatgatatactctgacccggcagctatgggattgttttttatgggggcgattgtccttttagaaaaaagccaaaaggtattaaatgctatggtagtatcgcctgtaaaagtatcggagtatatactttcaaaaaccatcgcattgattgctatttctacaatcattgcggtgatattgggatttgtttccggcagcaatcatttacttggtatcgcagttggtacagctttgacatcagcaatctttactatgcttggcattatcgcggctacaaaaatttcaaacttgaaccaatttctcattgtgattatgccgatagaaattgtttgctttgttccacctatcgttggtctgtttgtaaagttaccagatatattccgcttttttccgttcacagcttgcatgaacctcataactggaaaaagcattttactatcgtttgatatggtacttgtaattgctacgttgattatcctctacatagttgcgcgacatacagttaagcatatgtggagaagtttgggaggtgtaaagctatgaaaaggatattatccagtaccatacaggtatttaagcaaatcaagagcgaccctatgatgtttgcagcttgttttacgccttttgtcatgggagctttgattaaattcggtattccctttcttgatggaataacagatttttctttgcaaacatactatccgatctttgatttattactttctatcatggctcctgtattgctctgctttgcatttgcaatgattacattagaggaaatcgacgataaagtgtcacggtacttttcgattacccctcttggtaagtcggggtatctctttacaaggttgggagtaccctcaattatttcggcggtcatcgcttttattgtactgttgcttttttcattagaaaagttgtccattggaatgacaatatgtttggcgcttctcggctcagtacaggcaattattgtttcgcttatgattataacattatcaagcaataaattagagggtatggcagttacaaaactagctgcacttacattactcggaataccagctcccttttttattgatagttactaccagttcgcggttggcttccttccatcattttgggtagcgaaagccatgcagaatgaagcggttctttatttctccataggattgatggtagctttggtctggtactacttccttataaaacgtctgtttaggaagctggcaggataagaaggcatattatggaaaaaggtagacttctgcaaaacgaaaatataaataaggctattcaggtttccaaaatcacactaatcatcaacctgggtttatcgctacttaaatttgctgccggatatataggaaagtcaagtgccatgctgtcggacgctgtacactcggcttctgatgtattaagcacaatcgttgtgatggttggaattaaaatatcagaaaaacagcctgataaagaacatccttatgggcatgaacgtatggaatgtgtggcttccattattctctctgttgcattggctataacgggtgctggaataggatattcaggtatcaagaaaatcttttcaggacagtacaatacgctttctgtctctagtggaatcgcacttacggcggcagtcttatccattgttataaaagagtggatgtactggtatacaagaagtgctgcaaagcatacaaattctgacgcacttatggctgacgcatggcatcaccgctctgatgcactctcgtcggttggttccttaattggcattttaggagcacgtttaggctatgctattctcgaccctattgcaagcattgtgatttgcggttgtatcttaaaagctgctttggacattttcaaagaaagcattaacaaaatggtagaccatagttgtgacaatgctactgaaacgaagattagggaagttgtgcttcagcagcaaggggttgatggtattgatgaattaaaaacccgcatgtttggagcgaaaatgtatgtagatattgaaatattagctgatggtaatttagctctttatgacgctcatagaattgctgagggagtccatcaaacgattgaaaacaactttccacaatgtaaacattgtatggtacatgttaatacgaatgaacttccctattctccataggacagggaagatgatttaagactattgaaagggaaaggaggggaagtaggttatggaacaatactggtggattatcattgttatggttttgattgtcgttggcttacttaaaattgtaattatgaagaagtataaccaaaggagaaattctaacaatcgttcaaaaaatagcgaggatgacaagatgtattaagagcaattatccgatggtatgagatatatacctatgaaatttgaacgataaatcccagtttgtaaaagtcaataaatccaaagataaatttgtatttgaaaggagttttgaagaatgaaaaaatatgagtatgtagaaattaattataatgcgaaaggagttgtattcctttgtactgataaacacaaagaaattattgacagttatgcaaaaacggggtatcactacgcagggtttgtacccacagaaattgacgcaaaaggctgtatgcgaaagatagatttaatttttgaaaaagaagattaacttattttagggagttggttctaatgataggacttaaaagacgagatatgaattatattatgaaagttggtgctaaagctcaaggtgtttctgtatctgaatttagggctatgctacaagataccatagacaaaactatggaaagtacagacccagacgtgcaggcaaattttaaacgatactttggaaataagcggccaacaccagaggaatatatttatacgattaccaaaaagacaaaggttaaggtttaaatgttgtaaagggggcttgccgtatgaaacgctttaaatacaattcagtatattcaagcccaatttaacagcatactatttacaattaaatacgctataccagtagctcgtacaaaatttatattttgtgcgggcttttttaatacccgaaaagttttttaattattttcatttttttggaagcaaatcacaccttgctgtacagatatggtgcggaaagagggataaacacttttcaattcatagctggaaaggaggtgagattatgaaaccgtctgacttccaaaaaacaattcagtgtcagtttgaatgtaagctgaaaaaagttgtcaaaggtattatctggaactaccgcaaagaattaagacgaagaaaaaacaaggaaatatcttttagcgaattaccagacattacggtagaaagtctggcaacatgggacgactacgaaacaaactacacaatttttaatgtgtgtggcatagatattaaagtccttgatgatgaacttgcagaagctctcaaacagctacccgaaaaaaacgtaacaatgtattgatgtattacttcttggaaatgagtgatacagagattgcagatattatgaattataccagagaggctgtgttcaaacacagacaccgtgcactagaaactatgaaagagatactaaatgaaaagacaagacagtaaaggacgcaatttgcgtcttggagagagccagagaaaagacggaagatacgtttataaatataccgatatattcgggaagccacagtttgtatattcttggaagcttgtacccacagacaagacacctgctggaaaacgtgatgatatatcgttgagggaaaaagaaaagcagataaaaaaagaccttgacgacggtatcgacacggtgggcggtaaaatgacagtctgccagctttacgaaaaaaagaacaatcaaagaaagaacatcaagagaaacacggaattaggacgacagtatcttgtgaacgcactggaaaatgacccattgggtatgagggcgattgatacggtcaagcagtccgacgctaaagaatgggctatcagaatgaatggcaaaggttattcttacaagacgatagataactataagcgttccctaaaggcttcattctatatggcgatacaagacgactgtatcagaaaaaatccttttaattccaagttgagtgatgttctggaagatgatacggaagcaaaggttatcctgacaccagagcaggaagaaaaactccttgcctttatggaaacagataatgtttacagcaagtatcgtgatgaagttattcttctgctggaaacgggacttcgtatctctgaattatgcggactgacaacacacattgatatgcttaaccgtgtgattaacatagaccaccagctattgcgtgatacagaggtgggctactatatttccaaagctaagacaaaaaacggtaagcgagagcttccattaacagaaagagcatatcaagcactcaagcgaattttaaagaaccgaggaaaagcacaaccgcttgttgttggtggttatagcaatttcttattcttgaaccgtgagggattgccaaaggtagcaggaaattatgaaagtatggtgcgtgggttgattaagaagtacaacaagacccataaggacaagttaccaaacatcacgccccattcattcagacatacttactgtacgaacatggcaaataagggaatgaacccaaacaccctgcaatacatcatgggacacgcaaacataaccatgacattagggtattatgctcacggtactttccagtctgcaaaggcagagttagaaaggctggcttcttaatatcgaaaatgtatcttactacttatttactacttttggttgcattttcatgctggtaaatgccagcttatgcaaggtatcttccaaaaagaaaatgcccatacagcccgaaaatgcgggatatatcggcatctaccaacttatgaaaagataatcagaaatttagtaagtttttataataaaaaaataagaggctgtccaaaaatagagataagccttttttcataatcggaattataaaaatacacttgatttcatatgaaaaagagtgtctcataaactaaaaagtttactttgagacactaccttttttattcttatttatactttgtagacatattataatatgcgtttcactggtatctgaacttctgtcaaccagtcttcttcactctctttattccatataccatctatataagattctctaggatttccaaccactttatatttattgtcctctatccatttaaatgcatctgcataagtttttcctaatgttgaatatggaccattgtgtaatatacaaactgcattttcaactgcatctaattctttaaattttaatatatccgtatcttcctttaaatcatttatagcttgacacatttcaacatccatatcagtctctctatattcaccatcatgatatatattaaaacaataatcaggaactgcacatgtacaccctgttttcatcatttcttcagccattacatttggaaatagattaaaaagttcatcatatccctttaacacttttctcatagaagcaactttaacttttggtaaagacttaataattacatcattcatattgacttctcctttcaaattcataaggtaattacgtagtttaattattttatattcttcacttttaattacatccaacatttctttttctttattcattaaaatattttcaacttcttcaggattttctacagctttttttatctcagctaatgataaacccatttgttttaaagttattatctgatgtaatttaggtaattgctctgttgtataatacctatattttgtaaattcatctacatattctggttttaacaaccctatatcttcataataccttaatgtctttgtagttattttatttattttagaaaacattcctatagaaaacatctcatcacctgcgcattagatttgattaatttaagtttaaactttccccttaggttaaagtcaatacaaaataaattataattgtattaattcttcaattctatctccactcaataccaaaatatcccctgtttttataatggttgaacctttaggtattaaaacctgttcctttctttttatcataactattaatatatcgtctggtatattagaatctattatactcttattagcccatttattaccctcatcaacatttacttcgataagtttagagctaatttccccatcataatcattaaatgtttttaatacaggtgtattatcatcaactaaatccaactttctggctacagttggtatcaatgaaccttgtattcctactgaaagcaacgctataaaaaatattatatggaatatgtcattctctatggctactccttgagtaacagcataaattgcaaaaactactgaagccgcacctctaagacctacccacgatatgaataatttttctttatttgagaatttaaattttgctagaactataaatgttgctaatggtcttgcaataactatcatgaatatagatatggccattgctataccaaatacatttggtaacttagaagggaaagataacaatcctaacataaagaataacattatttgcataatccatgaaattccatcaaagaaatgaaccaaactttttttaagaggtatcctactatttcctataataatacctgaaatgtaaacacttaaatatccatttcctccaagatactcgctaaatgcataagaaagtattgcaatagctgttataaatatagtataaaatccttctatctcgaagtttgaatgccttaaaatataaacagataattttgctagtataaatcctatagctaacccaaaagctatttgttttattaccattggtgcaataagttctaccccagaattattcatcaatgtcaaaagaattagtgtcaacatatacgctattgggtcattacttccactttcaacttctaataatgatgcaagtgaaccccttaagtttagtttttgtgaacgcaacacagcaaacacagatgcagcatctgttgaagctgcaattgccccaattaataaaccttcaagtaaactagttcctattaccatgtggcaaaacatacctgtaaccccagacgtaattattacacccagtgaagacattaatatagaaggtatagcaacaggtttagccatattccagtttgttccaaaccctccaaaaaacattataaatattagtccaatagaacataattgttttgttaattcatagttctgaacctcccatgactaaagtcacagagttcctgcttcatagaattttgcatactaaaatatgtcttactaattctccacaggctatccccatagttcctacggttcttacataagttatttattttgaattgttattagtcttaatccttcttttaatatatttatacttgcatttatatctctatcgtgagtttcattacaactaggacaaatccattctcttatatttaagttcttcacttcctcgtttttatacccacatttattgcatatttgtgaacttgcaaagaatttacctacctttacaatttgtctaccatgccaattagccttgtattctaattggcgaataaactctgaccatgacacatcagaaattaagcgagatagtttacaattcctaatcatattctttacttgtaaatcttctatgcaaataatatcattctcttttattaatttagtagatagtttttgtagaaaatcatttctttgattagctatatgttcttgaagtcttgcaacttttaatcttgctttatttctatttaaactaccgattgtctttctcgataattctctttgtaatttagcaagtttgtttaatgacttcttaagatacttaggattttctataaattctccacaacttgagatacaaaattctttaattcctaaatctaaacctatctgattattagtattttcaaatgcttcaatgtctacatcagtacagcataatgatacataatatctaccacttggttctttagatatagtagcattaggtattctacctttaggtacttgtttatcccttatcttaaccataccaagtttaggtagttttatatgttgaccacaatacataatgtttccatttgtaaagttagttttatatgaaaatctattaattttctttgatttaaatttaggaaatcctgccttttttttaaagaatttttcatatgcattatctaaatcttttaaggcgttttgtagtgaaaatttgtcaggttctttaagccactttaattctttttttaagttagtcaaatcagaactacactgtttataagcaaaagtttctttatcgtttttataaacttctattcttttagcaagatacttattatatacaaatctacaacatccaaaagttttgttaattaactcttgctgttttttatttggatacattctaaacttataagctttttccactactgccacctcactttacttgttttttctgattattaatatattttcttatctgctcctctgtattttctgatacagtagcaacgaaataactaggattccaaagatgtctccccataatactggatgtctatatttgacatattatatgcatatcctctaccataagtaacttccatttttcatcacctattataatattaaaatatgcaattacttaaaacaagtattttgaaggttttttatatttatttttaaataacatatataagaacggtaaatcttaacttttatcatttttgaggttgtcgttcacataagttcgctactacctatgcagttctcttatgaacttcttacactttcatgtaagcacagactatatcttatccttcggcattatccgctaaggtctacccacttccactaccaatagcttgtagtgtacttccctcaagaggaatagtcgttgaagtttctcctattcggagcttacctgctgattgcccattttaaagtacttaggatttaaccttataccatctaaccaattttttctactttcgtaactttcacacttaggtttatttcatccttatgttttagtttggttagctttaggggtttccagcaattcaagtagtattggataggttctatcctatctctacatataggtttccctatatgctgactattttagctactaactcatgactaaagtcacaagtgtgcgtagctattttttaatcaaaatagattcctaccattccatcagacccaaataacatccctagtaagataaaaatcaataatattggtactccaaatttatacaataccttgctagaagttatacaaatcaatagtactaacccacttataatcattaattctgtcatagcatcaactccatttcatataaattttgtagattaatttgcatctacaattttattacttattcaaatataacatgacataaattttataagttatggtacataaagttcaacaaaaatttcacaatacattaaaatgtgagtgttatacttaaatttatatatttgttttaattatattcatttaatatttataatttgaattttttttattaatatttcattttttagttgattgtttaatatatttcattttttatagtaattttatatataactacgaaatataaagtaattagataagtaacaagaaactaacatgtaatgttaggtactctagatatgaaatcttaaaacttttaaatattgaaatatttctttatatatattattgtatatttcttataaattattgtcaatttattttttcttaaaaataaaataattgcataatttatttcaaattatgcaatttataaaatttattcccaaaactcttttactgtttcgattatctcactataaggcaataaagtcgcttcgattattgatttatttgtcttttctaaataatacttaatcatataatatccacaagcatatcctgcacaataaggcaaccctactggaaaatatccttgcattttagctatatcatcaccataaagataagatgttatattttgaaatccagtttcttttaaagcactttttattattggctttatataagtatttaatgtttcgatatctgttctactgacccaaggtcctaacatttcctctccaaacatccatgttgcaaaattttctgcaagaccttcatttatcatcatttcttctaatgttatattattattccactctataaactgaaatctaatattgtgattacattcatgtgctattaatactggtaatctattgatagtatattcattaggaaccaatgatagaaatatatatccaggaatcccaccatcaccccagtatccatcacttaatattgtataaggactatttggattcgccaataatattgaatatttatagtccttaatgtttaaatcatacccttcttttataaaagcatttatagagttttctatggtttctttgcaagtgccccaaattttatcagcagataacacatttatattctttttttgcttttcatcaatatccttaggcgataaaacccctaacatttcacttgctataattacatcatatccacctttctgtctagcaactattggaacattcatacacttccacttaaattcaaaaggcttcatcaattcatatctgtatatatcttcttttttgtttattggtgcatccattatcttcttgtatattttatctgagcgaatttctataatattcatatttaccatctcctttaagacaaagtatatacaattacgtagcgtcaatgtcaatatacattttttataatgtcaccttaatctttttattatattttatcctgtaaaccttccgtacatataacatttttttaaattaataaatttgtataatataataataaaaaattatatacttcaaggtttccctatgatacaatttactaaatcataatttagattatcaggtgcaactataaattattctatatcaaggaggatatattggtcatgctaactccatatttaatatttaatggtacttgtgaaaaagcatttaatttttatgctgaggctttcggaggaggaaaaactatatttgcgcgattagacagcaatccaaacaatcctattatgcacgcaagtgttactttcacaaaatacgaaggttgtataatgggtgcggatacagacaagcctgttgtaatttctggcatggcgatttgtgttgttctaccatctcgagaagcgatagaagaaatatctgtaaaacttgccgagggtggtacacttgtacaagaatttttaccacacccaccaccacatcaaaatgatggcgctgctgaagtacttgataggtatgggtatacttggtatttaagtacatagtaaaaataaaaaaactacatctaataatcataatatagaacagataaatttcaatttaatagtgtagtaaaaaagtcgtgtcctaagactgtcacgacttttatttgtataaaaatttaagtaaatatttttgcgaataagtgagaagtataactttaaattaatttcatatgtagtattggaaatgggttaccttgtccatctatttcagacctatcaaacactttaaatcctaagtgaatataaaatcctacagcttttttattctgctcatttacatcaacatattttacattgtatttatctatagcatattttattaattttttaccaataccatttcctctatatttatcttctataaagagcatctcaattttatctttatctattcctataaagccctttattatatcattatcttttatacaaactatattttctacttctttaagtccaatttcaactaatggtatcaaagattcaatatctttttctgttaaaaaatcatgcgttgctcttactgatgattcccagacttgcaacatttcgtcatattctgttgaatttatttgtttcatttcaagaattattccagatttcataaaatttcctccctatatcacttttaattgtataacacttttttatacaaaacttagaaaggactacgaaggttaagtatcatagtcctaattaagtttaaatattatctattatatatttttaacatttattatatactataatctagcaaatttactacaataatccatatcagtttatactaaaggtgcttctatttgagtagtaaaaaggaatttatgacaatgaccatcattaacagtagtttctccacatattaagtgaatgtgtttatcagttccaggtattctaattgctggccctgttgtaacacatatcttatggaaatggtcaaggaaatctacattatcatttattttatgaacatgatttgtacctccatttattggtatagcttcaccagtaacccctgctgcacggtggttatgtctatcctcacattcttctgctaacttaacactttctgaatattcatgaacatgtgtcatttcctcataatcattatagcacttgttgcacttattgtatttataatcatcatacacataatctctttcacatttataattttgataactcatttttatatctctccctatattatattaagaaattcttgtaaagaatctctaatgtataatatgaattaaagtcaaaaaagttcatattttgtaaaattatgtattaatttaattatttctcccagtatttagggcgtattagtgaagctggtaacttcgtactagaatctccttttgcagtatttacttgcaattgtgttaaaaatatactattttcaagattagcacctctaatatcacaatctcttaagtctgctcctattaaatttgccccactcaaatctgtacttcttaaatttgctgctattagaaatctacctcttaaatctgctcctattagatttatttttctaaggtctgctcctattaaatctatatttttacttaattttttcatatttttaagagtagaagtcttgataaatgatttaacctttcccatcacagactcactcgcttgtgataataataaattaacctttgttctatgtgatatgatatccaaattaattatctgttctgggctcatattagttatcttttcagtttcttcaattatcaaatcaatttttgatttgattgtatctgatatatttaatacagatgcttctttaagataccataacatttcatgtaattgtctcataattaaaaacacttcagacatttgatttgttaattctggtgattgcatccagtctatccccttatatgttacttgtgctactttttgacctgaaccaaaacaatcatatgcagtacaccctttaaaacctcgcttcataagactattatgtacagaacatttaaaatctggttgtaaattaatacagggttttcctgattccttatcgataggaaatccatctgaagcagaaaaataaagagctacacaacaaagtccaaaacacttcttacaatcaatctttagctcctcaaataacttattatcatatatatttttatgtatatctatcatattttttctcctcttaagctttatttttaatattatattatctataactaaatgataatcaagtcccttatttaacagttcttattcttaattataatttaaggtattatttattccaatagcatacataagtttctttatacttgtaacaatacctttatactaagacttattttaaatgtagcactgtaataataaattgtttatatactcataatgtatttgataaattgtaaatctttatagaagttgaaatttttaatgattttagaatcaagatataataataaatacaatttataaaatcagaaatatataaattaactatacaaacctaaataacatagcatttaaattcacaatttcagtataaatagtacaaagtatattaatttaaataagattggcttatttgtagaggagagaatattttggtgttcaataaaatttatatttaataaaaccataagaaaatataaagataaataaacaaacttttattacttaatagattcttatggttttatactgtactgaaaaacaataaacactacagcttatttataatattacgcttttttaacaacagaagactttagcttcatagctccaaaaccatctatcttacattctatatcatgtccatctgatgagtcatggattaaacggatatttttcacttttgttccaatctttatagatgatgaacttccttttactttaaggtctctaattactgtaacagaatctccatcatttaatacatttccatttacatctttgataatatttgaatcttcttcagctcccaatcctaatgcccactcatgagagcattctggacaaactaaaagagttccatcttcataagtatattctgaattacatttcgggcaatttggtaaattttccatctttatatgtcctccatttgttatttttaaatttcttattatataaaatttcttttgagcctttatgatatcatattatacttatatttacaaactactaatttacttaatgtttaaattctattcgtattattattaaacttgatttagctgtaatctctttcttatatttattatagttgatattattacaattttataactctatctgcctgctccgataactctaaatcatgagttacaaatacgatagttttaccattcttatttagatttttaagtatatcaaatactatgtctctattttttttatctaaattacctgtaggttcatctgcaaatattacttcacattcttttaatattactcttgctaatgctaccctttgttgttctcctccactcaattcgtatatcttttttttattgtattttctaagacctacagactcaagtgcgtaatttattttttcattatggttgatatttttttgatactttaaagcaattttcaagttattttcaacattttcattctcaattaaagcataattttgaaatagatagccataaaaatccctttgtaaaattcttatctgtttactatttggattttttatattatttattataatatcaccagaattaggtttttctaataatcccattatattaagtaaagttgtcttacctgaaccactatttcctgttatcgctacaaactcgcccttagaaatttctaggttaaatttgtctattatagatttatctttaaattttttagatatatttattaatgaaatcatctttttaatgttctccttttataattttattaaatgaactatttgagataatcttgtctaatacaatagatacaattacttctataactaatatcagaagtccaaataagataatattattacttaaatctactcttgttgatataatgcctattggaataatgtttgttaatattaatgagactattaacaacatacttctagctgtagttgaataaccaaatatttttttaatatataacttatatttatttctttcatagtagctagctactatattgtaggtaatcattaagtttgatattgctattattattatagtaaaaatttcactattcaaatatttttctagtttatttatttctaaaccatactcattataaacagcatgtaaactttggatatgcgcttctacaccttgagcttcaataatgttacttatatctgcaagggcatctaatttcttagaattaaaatatacacatctagatatataagaaagataaaaagaatcatcaatattatctatgtcaattattgctattgggtcatcaatgagattcctattgtcatccataacaagggagttataagtaaaatagctttgattattatctacatatattatattaacatttaaatctgacttctttgttttatttaactctctatttaactctttattgtacatattttctacttctattttttcaaaataaaataattctctaaactcttttttaatctcattttcatgtacttgtaactttttaggaactaataaatttatagtcttatcgtcataatcgattagattaaatatttctttgccatttgagtaaatagggttaactttaagatagtttttatttatttttatatttttaccatattgacttacttctgggtttttaccctttgaatttatttcatacatgtaacttccatcttcaagtttttcaaaattagttgaatctattaagaaagcatctttttcttctaccaaatttttatagaaacctttaatcttggcatttttaattacttcttcctttcctaaagattgttcgcctgtatctttaagagtaagattataaacattttttgctttatcccactcagatagatttcctaactgagtttgtagcatattataatttaaaatacagttatttatggataatataagaaatgatacaaatacaattttcaatgtgaaatgcattatatttacaaaaccataagatttttttccatttagagatagcacatatttagaacttctactattaaaaccaactattaatatagatatcaaaatatttatcaaaatacatataatcgaaaacatagcaaagtataagcatgctctaacacctatatttaattttaaaatatagattatatatattaataatgctgtgacagatgataaaatcataattctaaatatattttttataaccctagcaattatatctagcttagagtatccatttaatcttaaaatagaagcctctctactcacactaattgaataatgtattattgtagccaagaaacaaaggataattagtattaaatctctaattattgaaggatttaagtataaatttgagttaacatatctatcatgtaatcttgctacaaaaatacttctgtctacatttagttctcttaatattttatttattgtatcttcattttgagttgaaatatataagattcctgattctccaacttcacttattttaccaaaatccctaattaaaattgatatgtctttactcatagttgagaatttacctacttgattactattattactattattagtgtttatattactaataaattcatttgaattagtattaggaaattttcctgattttaactttatattgttattcaaacttgtatcagtcgtatatatagataatttttcattattattaaaaacatactttgatatagccacattattttcatctgcaatatctttaatccacttactataatttttatttaactttttataatctttaaacattacagatatacttgttgtatcgttatataaaatattattaatttcattatctttaactatatttagacctaataaagatactattaatagttcaattgtaaataatacatatattatctttttcaattatagctccctcctaattgtttttattctaaaagcaaaatatattttactttagttaaagtataatgctttgtaccttttctaaacaactactatattgtcacattctaaatggcaagtgtctatttcgtcacaaagataaaaataaccttaaaacagttaattttttataatcaactgttttaaggttattttttatttttagcaaacaatattttaatagtggtacaaaattagtataattcattaatatagattctagtatttttagcaatcaactaaaataatatcttatttaaaacaaaatttaatttaagttcaatataaactttacctcaactagaaaatatttcttctaacttaggaattaatgtgtggatatctcgtcaatagaaaactaattcatcctccatgttaaatttctcttatatttttaatgatttcacgaatctttttggcattttcagtaatatcctcaatagttcctttagttaataaaccaccaaatccacatacatcaactccattttctaaccatatatgtaggttttcaagattaattcctccacttgctaaaactggcatatcaggtattggtgtcttaaatacctttactagtttaggtccatagaaatctgatattgggaaagcttttataaaagtcgctcctaaacttagtgcatctactgcctcagtcaatgatgtacatcctggagcataaggaatctgatatctattgcaaatcttcgctacaccttcattgtaatttggtgcaataataaattgagctccatgtaatatagcatgacgagctgtttcactatccaaaactgttcctgctcccacacaaagtatttcaccatactttttattaagcccttgaattatttctccagcattatttagggtataactcatttctataactgttataccaccttttatacatccttcagcaatttcacatgcacggttaagattttcttctcttacaattgcaagagccccacattctgacattcttttggttatattcatctttttcatattatcacctctatactcatcaaaccactttacttattcattaattttagtcatgttttataatatatatattaattatataccagtgtaatttccctatttatattatctattctcactacttttattaagtattgtcctataattttcaactactcgtttaatttcttcaagtacttccccagttggttcagttacaggaagtcgtgcagttccaacattaattccattcaagacaatagttttcttcataacagatggaattgttccaagttttagtatacgtcgaagttcttctatactactttgagctttttgagcttcttccaaatcccctttcataaagttttcatagatagaaataccaatctctgtgaggaagtttgttgttgctgcaacagctccttgactaccagcttttagactatccagaataagtgaatctgagcctgaaaacacactaaaattctcattctgcgttacttcaatataagctttcatgttgtcaagtttaccactactatccttaattccaacaatattctttatctttgataattcacgtactgactctggttcaatattaattccagtcttacctggcatattatacattataataggtaaattaactgaattagcaatagttttgtaatgtaagattaattcctgttgtgttggtgtaacaaagtatggtgtaataatagataatgcacttgctccaatcgcttccattctcttggataaatctataacttcacgagttgaattaccacctgttccaacaaaaacaggtacacgattatttgtatgattaataacaatctttgcaaattcaactttttcatcatctgttaacacatgacattcaccattagtacccaaaataaataatccataaatccccttttcaatcaaataatcaattaatttacatgttgcttgtgaattaatattttgcttttcatcaaatggtgttatcattgcacatataatccctttatatttcataaaattatattccctctctaatagactttccaagacttcctgctggatgccatttcaaatactgctgtgtattaagacctttagcatattgtaatacaacacttaatgattgtaatactattgtttcagctaaaattgaagcacgaggagctttattaagacaatctccttcctgtttaacgcctgcgaacaggaatatatcagaaatattttttaaaaatgaactctcattaccacttacaccaattatttttgctccatttacttttagagtcttaagagttgcttttaactcttgagtttcaccactatttgatattgcaataacaacatctccttcaactacttgaccacttgacccatgtactgcttctgtaccatgcaatatatatgctgatgttccagtagatgaaagcaatgatgaaatatatcctgatacatgtcctggtttaccaataccagtcacatgtacacgtccgtgatttttttcagcttcaagaattaattcgcatgctttatttatagatgtctcatctattgaggcaataaattctgacaattcattagatatattatctaaaaattcagataatgtattttccataagatgtatcctccttgaaatcatagtaactatgactatacttttatataatttagtttaaataggttttataaattgtaaaatattatgtaatatcgaaccaactacgttgtaatcaatattagggaaagttgctccttctataccaagagtcccataaactggatatagtataactggtaaaaatgcaagtaataacccaacaacaaatgacccagcaatagcccctctccatcctcctgaagtattgccaaatattgcagctgtacctcctgagaagaaacatatgtgagcagctggaataattactacaggaaatatactaggaaatgatgccataatagcaattgctaatagaccagcagcatatgctgatataaacccaataataactgcatttggtgcatatggaaatactgttggaacatctagcgcaggacgtgaacctggaatatacttttctgaaatgattacaaatgctgcagttatttcagctaagaacatacgaacacctgacatcaatattgacatacctgccacaaatgtaaatgcctctataagcggaaaaaccaaccaatgtgttgaaccagcaatttcttgagtaaatgcttgaccagcttttaatgttgcaatatagaataagattaacataactatggatagacccattaagaagtctctgaatattgataaccacttaggaaattctatagtctctgttgtatcatctttatgttttgaaaataaacgcccaatataacctgataaaccataaccaatcatgttaaagtgaccaatagcttgttcgtcgccacctgttaattcacgcataaatggttgacagaattgaggtagtgcagcagacataaaccctaagatagttccacctattaaaatagtgattgtattatcaaatccatgtgctttcatgattaaaactaatacacaagaaaagaataaactatgacctgttgtaaagaaaatattcttaaactttgtaatacgtgcaaatactaaatttaatatgaatccaagaattaatgtacatgaaactgcaaaaccatatgtaccttgtgcaagtgctgtagctgcttctggtgaagctataacaccagtaattccaaagccatgttggaacagtttattgaaattttgaagtgctcctgtcatagcagaggcaccaataccaaatatcaaaaaaccgataagtgtttttgaagaccctgtaaatacttcaacggctgatttcttttgaagaatcaatcctatacatgcaactacgccaagcaaaacagcaggtgtactcagcaaactaataataaactccataaatattcctccttatcatattaaatttatccctcttttgaagcaaggaatttttctagtgctgtctttatttcattacggtcaacaatattgtgaatcccaattatatcaaacttcaaatttttattttttaattcttcagcaacatcaattaatgtttctacagcatctccattgaatccatttagtgaatccaatgaaccatgttctacttcaattggaaagttattttccttaataatttgttgagtctttatttttaacattaaacttgagccaactcctgctctacatgcgattaaaattttatacataattaaatcctcctttataattcgtgtgtttttataaaatcaataatttctttagcctctttagcactatctaaaaccttaaaaaactcatcttcttccaatagttcaactagctcagacatagcacgtaaatggctattattgtctattgcacttagacaaaatacatattttacagggtcgttttcgttattcccaaactcaataggactatctaaagtagcaatgcctattgcaatctcttttgacccagcttctggtctagcatgtggaagtgcaacatgttttgtaattactatgtatggtccagatgcttttgctgagttaatcatagcatctacatacccttcagttactttgttattttcaactaatacagaagctgactgtctaatagcttcctcccaattcttagcttttacctttatttttactagtgtttcattagtaatctcacttagcataggcccctctccttccttagatgtaaaattctctatctgtgtaaaataagctaatagctcacttgaaagaatactttcagaggttacatttgcatatttttttattatatccataacctcatctattttaggttgtcttaaataaatatcacctaattgaatatacacttcacgtgtaatcttatatttttcttttgtggtcataacagggcttactttaattactggtacatctgtttttaaaccctctgcgttataattagtagtaaatacgatatctacaggttcacttatattttctaatccaactgattccgacattggtataaagtgtaagtcaggaaataagtttgtaagttctgcatgtaaaatagctgaactaccaacgccatttgaacaaactattaatgctattctttttctaaaaccatcaaattcttttttatttgaaaaaagtgttgcaaagtgcattgtaagatatgctaactcttcttcctgaatttcttctccaaataatccgcaaaactctttcattgcattacttacaattctataaactaatttatattcttcttttactttttcacaaatcggattatagataggtaatttaaataaaagtctatagtaggcaggtctaaaatgagaatataattgtttaaatattttttcttggcttatatagtaaactccgcttaaatatccaaactttgtcatcattttatttacaatttttgaaattacatccttatcttctgtatcttcttcataatttcctaccgatatacctaaaatccaagcactaatatacattatattataaggctttatcttatcctcactcccatatacttctaataattccttagcaaatttatactccttcattgaactcataactgaaatattaggaatatctacattttcctgagtaactattctagttgaatacatccttgcttttagaaagataaatatatatataaattctattaatctatcttcaacaaaagtaatttcatatttttttattagctttaatataatttttttagcctcttcaaaactatctaaattatattctttaataaaaatatcaaatactcttgaacttttctcattagacaaagtttctataatgtttttaataagcactctcctaatttccatctcattgccaactatgtaatatccatttatacgattgttcttaactttaatgttcttcttttcaagctctggtatcaaatccttgaaatcaagatttacagtagacctacttacttttatagaatttataaaatgattaattgaaatatcctccatgttaataaaaagcattaaatacatatataaaagtctttctgtcttactaaaataataagtattcttagaatagtttttttctaaaatttctttaattgctttttttgtttcttttctaacgataatatctttatcagctcttaaacatataagtggtacattttttactttaagcatgtcattgattttatttattctataagtaatttgtctctttgatgaattagactcctcttgtaatccattagttgtaatcaatgtgctatttaataaaatctggagaattgatacaatttctttgtccactaccattaacccctactttcttattaagattagtcttcatattatcattggattctttcatcacctccacaatacttattttatttgagaattttatcgttttcaatttcatttaagtataacttttgttttagattgagacaaaaattaaacttatctaaaatagctactatattacacttatagattttataaataaaaaagggttccttatgtaaagaaaccaaaaaaaatttatttaaagaatcaaagcgatactaattatgcataaattaccataaataaaaggcacattaatttaaaataaaattaatgtgccttatttataattctaatatattaaatttattttttaacttgtagtttaatatcctttttcttcaattaattcatataaataaagtatttaataataaatgttccttatgactttaatattttaaaccaagaaagttaaagtttctctcatataataaattgacacttatctatttcattcttttaagtgtacaataagtcttcttctagcagtaagagtaagtacttcctctacttatcacaaactataatttttatctcattggtatatatccacgatactgtgagtatgcatccatagttgctatatcacctaagaatactgatgcgatattgaattgtggttttaaatatgggaactcctcttcttgtgcccattctggttttttaataaacgactttgtctcttcaaccacagctttataccattcctcttccccttcaaaccatagttctgatacacggtcaaaagcagttgctccataattaatcattattttactactgacaaaacgattaacatagcaacagtttgtaaagtatggcactacctcatcatagaaccatttttctccttcttctttagagataccatctggatacttaatcataaattgccaacgatagtttggtccatcttgtacagtacgtccttttcctctaaagtcttcttcccagtttattggaacaaaagcaaatataaatggtgggcatccattatctccacctactgcacgtcctgcatctccactttctgcattttcatgaacccttttattttctacatctggtatacacccttgccaacgtagaacatccataggcatatattctgtcataattctatttgccatctcaggcatatgttcatctacaagccaataatgttctgttagttgcatcttacgtgcaccaaaacgctcaccttcatttggtgtaggatatgcttgataaaaggcatatttagtacaatatggtccaaaagtgctaatactatctggaatatggtgacgatataaccagtccattaacttaggtctatattcttccttggcaagtcctacatatattaaacttctcattattttaaattcaaaacccatagccattctcctataatcaaagtatattcacatgctttcaatttccctttttcttatctttactcaaaatatatattgtaaacaaatctacacctgcacccacgtaccatactcctactgccatagctacagcaatttgaatacaaatatcttgtaaattaataatattttcacctgtcataatagttagacctatagcccaaccacaaagccatgatggtaggaaaattattttttcaaataaggatgcaattacaactgcaaaaaaacctaatatactaagtgttaaaaataattctaggttttgattgaaattcatatatcccataattaaaatggctaacactgcccataaatctccacaccaaaaaccaaacattatttttaatccatctttttgtttattaccattagttacatataatcctgcacagattagtgctacagctccagtttttattcctatataaggtgctaatactgcccataaaggaggtagtaaagcaatccccatagacagtgttaatatttcttttttctttctatccatttcctatattgtaattagtagcttccctagcttgccttatctccaatagcttaattgctatttgatttacaatcatagatactgcaaaataacttaagtataatggtataaatataacaataaatgctggagttaatccaatcttgtaatatgtaagtaccaaaaaaataactgctaaaataatttcaatttgtttaaaacttggcttttcattcatacaataagcctcctataacatctaacatcccttaaaaaagagtcttagtattttaattattatcctaatgaaactccagcttgcttttctttagttaatggctctataaaattataagatgtttttctttctttaaattcttgtgttttacgaacttctgcataatgaccttccattttcttaatatcatcaccatgtataaacttacctggtaaagtatcatgagcatgacctaattgctcttctggaaaactaaatatagtttttccacttatagtatctaactctccaactataccacatagagcacaaattgcctttttagtacctgactcaaggtagaataatctattgtggcaatgtggacatacaccttcttctccttgatatgaagctttttcaaaatcttttgctgcttcaactatatttaaaccaatttgatgaacttgaacaagccttgtatcatccattactaattcctttgcccatgggaaccaagcattatctataactttccacattggtatgagagctagcatagcatgttcacattgaactcttgtaccccagtcagaacctcctattcccataaatgatattactttatcattaagcattcttgagtctggaatttttcctcctatagcttctgcaacttttgttcctataatgttatttcctctatctgctctgggtccaaaacggtccattatagtatggaataatcctgatgccccttcttcaaaaatagggtctgaaactactataccatctgcatctttcattttgtcaagcaaccattcaaaatcatcttttaatacacacatactacctttcccggataataaagttttaacgcacgcacaacatccagtacaatgtttaatgttaatagatgacatttgaataaattctacttcagcccctgcttctttggcacctttaagtgcaactttacacattgtgtcattatttccattttttgttccaaaagaaatacctagtattttcattttcaactctccctctttagtatttatttaatcttctttcatttttaatatatagaatccatcatctaaagcatctatgatgatgtagcctctatcatcaacgataagatcttctgttactgccaagcgtggtcctgggaatcctgggaaataagattcttctggtgttttatttggatttggtggtataaaatatgctagctctttgatataatatgggtctgatacatcataaacccttagccctgcatggaaataacagcaatatactctatctcctctttgctctaaccatggcttattatccattggttcatgaagattatgtggaccaaatggccctgcttttcctaatcctgcaacattaaagttaggataagggaaatcttttggaacttcaggatatgggaattgagcaattaatgttggttttgttgggtcactaacatcaaccatatgtatattattcatagcttgaacatctgtaatgttatctggtttaaagaactggaatctttctccctcattttgaacaacgactaaatctcttcctggcaatggtaatgctgtatgagttcttgcacctgcaagtctactagaaaatgcaggcataaatggcaattcacctaagcatcttggtcttgttaaatcttcaacatctaatacaactaaaccagctcctccataaccacaatatgcttttccgtctcttacaaatggaggtccatgaagccatcctttatccataaattctgggcaatgaggtgctcctgcatcaaaagttctatttggatatccatctgcatattggtctggtctccaccatttacctatttccactggattattaggatttattatatctatgaccctataaatcagaccttcaaagccaacacaatcacttgataaatgtacatatcttccaccattgtacatgaatctatgaacacccattacatgctttaagccacaatcccaatatcctaaaaacttaggatttaaagggtcttcttttaaactgtatattctaattcctgcttcacacttaatatttgctaatttagcttggtcaacaagtgctcctggtccacttccacaactcattgctactatcattaaatcatctgctatttgaatttttggagttgttgttgtaggatactctttagggtctaacatttgaaaatgttttataaattgtggattataagggtctgtaatatcgctaatcattactccattttttttatttcctccaaaacagcatccatataaatagtatttttcatctcttttgtacagagccatttgaaacattccacaagttccatctaagttattaaaggaacaaacttcaagatttttaatatatccgttatttccgttgccttttgcataaaatttatcttccattttttctcccttcttatttaaagtattatcaattgatatactttcattttatgagacaaacttacttaaatccaatatcgttttcattggaatatataagttattcttattaataaatttataaaatctaatgtaaagatatacttaaaacatatatttttatacaaatattttctaatattctttaaaagtaaattttcttatactataataagctttaattatagataaataaggtttacaaacaatcaagtttaaataggggtgattatttgaatactaaacaattagaatattttatatctgtagcagaaaatctaagttttaccaaaacagcagaaaaattttatatttctcaaactgctgttacacagcaaataaaagctttagaagaacaaataaatgtaactctatttacaagaagtaaacgtcatgttgaactaacaccagccggaaaagtttttttatctgaggcacgtactataataaaaaatatcaatgatgctattgcaaaaacacaacaatttgcacatggtttttttggaactttgagcattggaaccttaataggatatgaaaaaaacaaacttcaacaatacttaaaagaattttctaatacataccctaatatatctatggatatttgtactaatgaaataaccgaacttttaaacttagtaaaaaataattctatggacctcgcttttgttattaatccagaaaatcaaccattaaaagattttgaatataaaactgtagaaagatattctttggtagctcttttacctcctggtcatccactttacaatgaggattctatcgatttaattgaattacaacatgataaatttatttttgtaaaagaaacaggggatgagtatggacaaaagtcaatgatacaaaatagatatcgtgaagcggggtttgtacctaatgtggtacaacgttcaaataatcttaatactattgaatcattggtatcttctaacatgggaatatccattttaccttcattttgtgttacagatacaatgatagaacgtgatattgcaatagtacctataaaagaagtagaaaatagaattgaagttgtggttgtatggaataaaaaaaatacaaatccagcattagaaaagttcatttctataatataaaattaatcaatattaactataaaaatagcattaaccatttttatatggttaatgctattttctactattttattatctaacttttaatttaatatttataatcgttaaaaataactctgtttaacaaatataagcaagtcaaaagtgtgtctaaaaaagataaaaattttattatatacaaatgtattatctcaatatatctattttttcattgttcatcagtctaagtacatgacctgtgcttactaaagaattatccccataagttgtatgagctaacaccgaactagcaaccccaaactcaactatatcttcactcttcatattttccaaatatgaatatataattcctgccacatatccatccccagcaccaactctgtcatatatttctaacttatactccctactttcaaaataaccatcatcatttgatatatatccctttataaatctattattcatatcatcaaatcttctcatagttccagctacaatatctatatcatactcttttttaatcaattctgaactagattttatatttagactatctatattaagtatcttatttatatctctataactagcaaacagcccatgacaatatggtagtattttcttataatcatttactaaatcatcataagtcctttctggatttaatgattgtctaaaattaaaatcaaagaatacttttatccccttttcataagattttctagctagttctaaagcaatctttttaactgaatctgtaagttgcatagcaataccacaaatatggactatatccatttcttctaaacatttatcaatatcataatcttgtaatttactctcacaaaatgaactatttaacctattcaaataagtcacttcagaaggtctttctccatacccattttcaagaaaatacactcctatatgattccctccatatgtgataaagtcatcttttactccaagctttcttatatttgcacttgatgctttacctacattattattaggcaactttgtcaacatataggtattgtatccaaagtttttaagtccagataatatatttaatcccgtgcctgtaattatataatttagttcattggtttgtgttaagaacttgtagtcaggtactgaaagtctcatcattatttcaccaaaagctaatatattcataaatctatcccaataattctttcattattttataaagtactcctatatcttccactttcgtatcacctgtttctttatcaattattgatgtataaacatgaggtataactttttctacaccagcatcaagtgcaatttgaactatctctttgaagttatctaagtctataccccctgttggttctaaataaaaattatgctttgcacaagcttttgcaacttctatatattcatcctttgttttaagccctcccattggaaaaaacttaattgagcttcctcccatatctttcatcatagctattgctgtttctataggaactataccatctttttcttttgaacttaatggacctgtggatatttttacaaatcctggtttaccagttggagaaactaatccatttattatactatcattttgaccaagcaatgctctagatgtagcgacacctgtaaacacttgatttatatgttgtggctgaagttctttagaaatctgagataccatatttgactgatttgggtctccagctccaagacccacagatattgcattatctatttcctttgagtattttttcatatcttcaatagctgcttctacagtgctataattctttgatagtactcctactagtacatgtccatcacaggcatcatatacttctttagcattttttatgcttcctgcaagaacatttaaacaaactctatttttataatattgtggtatacaattcatatttatcccctccattggtaaaattcaatttattaaatcattataatgtcacttactctacactctaactttctactatattttttatcctattataaatattatctaaatcacttccagttacacttcttatatcaatctcaatcttgccttcattagccttatagtctctagtgtatatagctatctctccacttctaagttcatttataatttgttgtgttgacttatttattatatcttcattaaagttaatttctccacgaagtatttctctacctgctgaatctctagttatactagcactcactccctttatagtatttatcttgtctataaatggatttagcttgtcctccatttcttttaaagttactttatcattacttatatatctctcaattgcacatgttagacctacaatattttcttttcctattttcatagctcttcctataccctttgattgaagctttacattatctatgtattttttcttacctattactaaccccgagctaggaccttctatagccttagcaccactgtatatcactaggtctgctcccaattcataatatacatttaaatcttcttctgctgctgcatctactatcaaaggtaaattatattctttagcaacttgtactgcatctaatacacttagcatactcttttgaacacaatgatgagatttaatatacataattgctgctgtattttcatttatctctcttattatatgttccttgttacacatattagcatagccggcctcaacaacttctcctcctccaagtcttatcattacttctactggaactccataatcaacattatgcccctttggaattattatttcccttttaacttgtttcttaggattatttacattgtaaactagactcatatcatcttttgctatcattgctcccacactctgtgcaatcccagcagatgcactagaaactattagtgcactttcacaccctaataaatttgctatatattcacctgttttatttacaagttcttctattataaggaaatttttacacccttcacctattgcttcaataacttccttatctactgttgatactcctagtatagtcattttgcctgaagcatttataacacgtcttacagagtatttttcaaatatactactcatacaatagtttctcccttctactcattctcttctatagagttgcctatatttaaatattctccattgactactactgctcttggctttatagacgtacttgtgattactgacttattcaaagaatcttgaagttctttttcttcattaaccacatcaaatatagttaaatcagcatcatatccttcttttattaaacctttattttttaaacttattgcatctgctgcatttttagtaactttatctattatatcttcaagtgaatagcccatatatataaacttttccattgttgtagatagattatacactggaccatttattctatttttaatatatatatctgtacttatagtgtctggaaaaattcctgcatccttagatttcattgcaatatccatactaaaactttcggttccatgacctacatcaagaattatacctctttctttagcttctatgatttcctttttaacctcattgcctctaagtattccatttggctttccattatatatatgggttaatatatctcctttttccatataatcaaatatatcctctatcgttggaggagaactcccaaagtgaaccatcataggtagattaagttcattttttattcttttagctacttttaaaggttcaacatcatttgaaattacaacacttttactcattctagctttgattccaacaacaaaatctttgtattttctaactgcatttttaagttcatattcatcaatattcatcatatttgaaagttcatcttgagatgttattccctgcttagcaatatttattaaagcatatacattggtcttatactttttagtatcttcataaaattcacctatatctaaagctcctgttgttcctgcatctactacagtagtaactccactttttattccaacctcatctggataatccttataaaggtctagtctttcgtagcagtgtgtatgtatatctatccaacccgcactaataaatttctctccatctaagtttataatttgttttgcctgatacttagaatcatctatatgattttttacttctattattttatcgtctaatatagctatatcaattatacttttatctactgtttttccacattttattaatatgtctatcttcactttactctccctctaaaataatcttaaatttactccaaggttcaataaagtctaaaagtattatttcgtcttcctttattctacccaccttattttttctttcatctgtacaatcttgaagtatcaactgtaattcccctttatactttccaaagtcatcattaccaatcactacatctcctcttttaaagatgttcttattatcatgtttagggaaattttctttagcatatttttttcttacttctgtagatcttgctacctgattagttatatctcctcttctaaagtgttgctcatttaccattattatcttttctacttcagaagttttttctttagctactacattaaatacaacttggtattcatttacttcagacattctttttaattcatcttcacttgcatatgcatttcctacaattacatcatcaatcaatcctgttgcgaataagtgcttagttgctgtagcaatatctaagtttctatgcatttcaagcgtacacagtccatcatttatattccaaggtccgattgttgcgtattttgaattgacaaaagcagcagttcttattccatactttttaaatctatttgagcatcttacaaaaaaatcatatggcaagcctgtacccctttgaggataaaaattgtgacaaccatatatattatttacatttggcttgtaagtaattatattatccaagtatgctacatcattactcatatttagttccacttttaaatcatatggattgaaagaaatcatagcttctttacttccatcatatccatagtcaagccttattccactagcatttaactcactaaagaatgttaaatcatcataagatatttgtaatatatcaaatatgtttggagctatatcaaggattacttcaaatcctaattctcttgcataggttataatctctttaaaatgttttttaacttcttccttaggtcttgtaattgaaagcatgcacataaatattcttttaaatccgtattttgaaaccatttttatatatgccttatcatcttccatgttactatgctctggatatactgatattcctaatcttctttccatctttctcctcctcaaattacattatttaaaatatataaaattaaaggcaaaggtcattcctcctaccttcacccttaataacttataagctttttctatattttatatagtacaaaacctctatatctatgtatttttataaattttcactcatttcttcttgttctctttgtaattgttgtttttcaaaaactttgaagaatggataataaacagcaaatgatatcacaaagttgattaatactaagatacctgctagtatactccagttagtactcattactgctgctattggtgctggcattgcaaatggtaatcttgctaccatcataggtataacccctgtaatagtaagaacatatgatagaattgtcattattataggtccaattataaatggtatccctagtattggattcataactattggtgctccaaatattataggttcatttatgttgaataaccctggtaaaaatcctaatctacctaaactttttagatattgtgacttagaaaacataaacattacaactaatgcaagagtagcccctgctccccctatccatacataccactgtaaaaattgttctgtaaatatgtttggcattgcatgagctgatactccttctgtgaatgcagttatattttctgctatagacatgtcccatataggtcttattactggccccattatagctggaccatgtatcccaagtacccagaataaagttattaggaatactgtcagtagcccaccacctaaactatttcctgataagaatccttttaaaggtgataacatagcgcttagtgcaacacttatatcaaatcctaaaatatgtcttattacccagaataacattaaaattactgctgtcggtaataatgcagtaaatgaatttgaaacctctactggaactcctgctggcatcttaattgtaatattcttttccttcataaaacgatatatttcaactgtaattaatgatgttacgatagctccaaataatgatggcgaattaagttttgccatatccatccatctaccagcttctataactccacctactggttcaactacttgagttggaactattgtagaaactaaaaatgccataactgcaagcataccaacacctgttgtatctaaatcgtagcttttagcaagtgatgatgctatcccaaaagtagcatatagagataaaaatcctacagtatatctaaatggtatatctaatgttgctttaaatggagctataaaatccatataagcatcaataggtatgtttaataatattgtgaaaaatgaccccactattgttagtggtaatgttgctattatacctgctcttacagctctcatatgtctctgattacttatcttcgctgctacaggcataatcttgcgctctaaaaaacttgcgaatttttccatagttatccccctgtattattgatattatcctttatttataatgcaataacgatttcataacataaactaatttttatgtaattgataatatcacttatttattaaaaatattataacattataatgtttggttgtaaacattataatgttataatatttttcgtttttacaactaaacaaaaatcctgagcatattatcatttcaataaactcaggattcttattatatttcgtatttaattacgtagttttgtacttctgtattatatcttgcaaatgatagctcaactatattatcattctcatcataggtctttctttttcttcctaataatatgtctttagctagatttagagcctttgatacctctagttctgattcttctataaaaaattcatcttcaaatctagttatatttatatttctcctatataagtacatatataaagaactttcattattaaaactttcaacagttagattttcatcaaaaggaatataatgagtaaaaaatatatatggcttactatctaagtaatacattctagtaatcttgctacatttttctccaaatatactaaatacttgtgaatttgtatcatttattattttttcaattgaaatagtctttttagataacttatgacctttagataaaagtatacttgaaaaagactctgcttttgatagcttattaaaaagactattacttattacttttgtcccttttccactttttttctctacatacccttctgattctaatatctcaatagcttttctaatagtaattttactgactccaaattcttgctctaattctctttctgttggaatattttcatcaattttatattcgttatttaatattttttgctttaatatatctacaacttgtatatataatggttgatttcttaacatgattcacctcttaaattatatgttataatattataacatataatcttatattattaataataaatatttattaactttaaactaaatataaaaagagtcctcaaaataatcctaatgtattactcactaaatattgaatcaataatctaacaattagtgtgctacacataatgtatcttttaagaactctcttaatttattctctttaatttttatttatcttgtaatttcaaatgtaaatcaacgatttcttcagctaactgttgaaaattcataccattcattaggtggtcctgtgcatgtataagtatgacacttatttcagtcctgtttccactagcttcgttttgtattaattctgtttgatatctatgtgctttatttataacttccttagactcttttaataattcttttgctttttctatatttccattcttagcctcttttattgcttcaaaagctaaccctttaccttcacctgcataacctattatattaaaagatatttctataatcttttcatccatcctttgattctcccaatttatatattaaaaatacattataatttatattacttagtgttgttaagttctatcgctctatttaaaacagcttctccattaactgttccatagtgcatcatatttataacctctactggtatattatatggcttagcaatttcttgagccttaggtaatacatatctaacttgtggtcctagtaataatacatcacatttttctatttcattttgtatagttgattctggtattgcccaaatttgcgactctataccattttctttagctgcactttccattttagtaactaataaacttgtagacattcctgctgaacaggccaacattatttttatcatatattttcctccaaatttttattaacaactatataaacattataatgttataatattttatttaattctaccttaaatgcaatatactttcaatacttttttgttattttaatattattaagtgtcaaattagcaaaaaccgtatcatttatttatgatacggttctccattatttatcctataagccctataaatctgttctaacaatatcaatctcatcatctgatgaggaaaagtcatcttagaaaaggataacctataatcagcccttcctaaaacctcatcagaaagccctaaagaacctcctattataaaacagagactactattacctctaactgctaaatcactcatagtcttagcaagttcttcagaggataaacccttaccatcaatagccaagactataacataactattatgctttatcttccctaaaattttctttccttctttgtcttttataatttccatttccttaacactcaaattctctggagctttttcatcatccaactctataatttctaacttacaatacttagaaagcctttttttgaactcatcaatacctaattttaaatatttttctttaattttacctactactactatacttatattcatatatttctcctaaacttaattttattacaaatctatgcattactagaatttacaagctcttataaaattatatctctttttcttgatttgcatattctacaaactcttcaaaaggtattgctttgctataataatatccttgatatatttcacatcctaaaccatataacttatccctttggtctatattttcaacatactcaacaactatatcaaaatctaaattttttgaaagatttacaatagtcattataatttcactacttcttttatttgtaagtatctctttaactaatgaaccatccaatttaactatatcaaagttattattttgaagatatataagagagctatgccccatcccaaaatcatccataattaactttattcccaagttatgtatcgcattgatacgttcaataattatttgtgaacctgataatgcaatttgctctgttatttctatacctaacatattaggatttatatcattactactaatgatattttttatttgctccggtaacttagggtcatcaagttggtctggagatatatttacagagaacttaacaggatttctcaatagcttttcactcttctttaaatcaatacatgctttattaataatatactctccaagctcatctaagaacccttcttctttagccaaaattataactagtggtggataaatgaaccctcctattgaatgtttccatctaagtaatccctctgctcccacaacatttccattataattgacttgtggttgataaaaaagttctatttctcctcttttcatagcaaacttcaagtctgatgccaacatttttgaaattgaacctattttaccattatggtttagaagattaggctgttcacctgttaattcatacctttttaataagtttgttaaattttctatattattcttaaacatatatgtatatctattttgcgacatttttataaacggaatataaatcataacaccaacacataaattaaatacttgcaacaaactacctcttattgaacctgtagacatatatccacttaaaaatataggtgaggtccattctacagctgaaactgtacatggtacaatacctgtagacatagccacataacttgtaatggttaagattataggagtaattacaaaaggtacaaacataatatagttaaaaacaattggtatcccgaaaactagcatctcattgatattaaaaagagctggtattgaagcaattttagctagctttcttacatttatacgtttttcactaagaaaaattgcaattactaaacatagtaaagagccacatcctcccaataaaaccattgtatcaaaaaaggtcttagtaaaaatttctgttggtaattgattattattaactaaatttatgttaattgccatactattttcaaataaattttttgcgacggtatctaatacattactaccatgaatcccaaaaaaccacataaagtgcattaaaaaaataaacaacagagcactcataaggtttgttcccattttattaaaaacatttgaaaataaattataaaatatatcttgaaagtttgaactgccaattagacttatcattatcactctaaaaatagaaaacaaaaatactactattatgaaaggaactatagccgaaactaccatattaaagtctgcatcagccccttctgtatgaaactttacacttgtaacaaaagattctgtaagttttacaaacaatacagaagatgtcatagaaacaattatagatgtaaataaccactttgtcttaaatatttctatataagaattaagctcattaccatgtgaaaatactaaaaaagagcacattgcaactataggaacaagtactgtatacttgctcccatatatttttccataactatagcttattgttaataatattattaatgaaataattcctaaagtagaatcatttataaagttaagaatatttgtaacctctccattaaacaagcctgataaatattcttgataagcctttattggaagattcaaaattacaagagccgttgaaccagtcataatagcaggtattgctaaaatcataccctgctttatagagtataaaattttattatcctcaacattttcaaaatttctctttagcaaagttattcacctctacttcatctcataaacattagaaacatcatttcgtgatagtacatctagttttacatcttgtccaactactatatcatttgatgctaatactccttttgaagtctcatatgctaactcaggaaaattattttctttacttaaatgtgctaataatatagattctgtaccttcattaataagttcaacgcagaaattagctgcatcttcattggataaatgaccagtacttgacattactcttttctttaaagcatatgtatatgaacccatcataagcatattagggtcataatttgattccaatactactaatttagatttatatagatgtttttttatattttgagttatacatcctatatcagtagctatagacattttttcatcactctctgtataaaaattatatccaactggatcagacgcatcatgttctattgaaaaaggtctcactatgatatcacctaatgagtaggttttatcattttcaaatactttcatatttttatctttgatgtcacctaatttgtccttcatagaacaccatgtttttatattagcaaatactggtatatcgaactttctggataatatacctgctccttttatatggtcaacatgctcatgtgttataaatattccttttaatttatctgcatctacaccaatgtctttaagacctgtagttattctcttgccacttaatcctgcatctactagtatattagtatttttataccctatatagtggcaattcccactactaccactccctactgaacaatactttagcattccttcacctctttttctgccttataaattatattataccaaaaaaacagagtattaaataaaatttaatactctgcacaaaatttacttacattcactatttacttacattcacttataatcttatttatatctacacctttactattccatagttccacaaaagctcttccattagcatttttatgcttatatttattatagtattcatttaaagtctcaaagaatactttatctccaacttcttttcttatttcattaaatgctattgcgccttttgtataaacattcaagctgtattcagtagaatttttatactcatttgctggcttaaatatattttcactcaaataactttttgtctgtatctccatagtttttataagcttgtttgccatatctttaccatacttttgttcaaaataaactattgtagaatattcagtaagtgcttcatctaaccagggttcacttatttcatcatttccaacagcagaataccaccattgatgtgctgtctcatgggcaataacatattctagtaaaaattcatttttttcattatataaactttggtctatcataacaagcatagggtattccatcccccctataaaaaagtcacttgctacaacagaaaattctttgtaaggatactttccaaataattcactaaatatatttattgaatcttttgccacttcagttgcttttttagaaagctttttatttaaattatatgtattgatagctactccctttgaatctactttgtttacatcaaatttactacttagtataaatgcaaaatctctaacgttttcagcttctatttcatatagcattttcttattatcatgtttatcatcaataagttttcctgtatgagcaattttatatttatttggaatcaatagtttcacatgaaaatcgctagtctcactataaaatgggtcgccaatagtttcataactctttaaattccatcccctttcatcatttacacaagctataggaaaccaattagtaacatttatagtattttctccatatccaaatcttccaattgaatttggtatttttacgttatattttatatctaatgacattctttcatttggttttaactctttccctaattctatttctaatatgtcatttttgtctcctttaattttatactccattttactattattatttaatatattctttatatctatatatccttcgttaaatccattaggataagcccttgtcatttcacttttttcaaaaggagcaaaatctttcttggaaaaagcattcggatatatatggaaatatattttatctatgtttgattttgtattatttatgtagtcaacattctgattgcacattaacctcttagtctcatcatcaaatataacatccatattatactgatttatttttgaattagttttttctttgtatgtttctaaactgtcatccttttctataaagcaacctattattaataccataaatagaatcgctactgataatgttcttcttactttttggttgaattttataaccaaaatatctcctccttttcaaaatgaatacttttagaaaatatttacatgctaatcttgtgaccttttatttgtttacagacaaatataatataaaaaatgatataatttaatctgaggtgataaaatgttttttaaagaaagcaatgaaatagatttaggtgaaatcactattcccaatatctttatagatatatttatgccaatggcggacgggttatacgtaaaagtttatcttttaggatatagacaagcatgtgatattacttctaatcctaagttcgacaataattcaatagccaaaaacctaaatataccattgtctgatgtgttatctgcttggaaattctgggaagaaaagaagattataaaaatacatgacaatggagaatatgataattttaattattcaatagaatttttagatttaaaaaatttctatattgagaatatattaagcaataattcatctataaaatctaatacagataaggttgtatctacttctgaaaatccaagtattagaaaaatgtttaattctataaataaaatagttgggcgatatctcgacccaagtgaaaagatgagtattatggatataatgaataaatacaatatgagccccgatatgatactttgcgcatatgaatacgtcaaagataaaactggtacatcaaagccagttaaatacattgaaggcattattagaaattggtatgattcaaatttatatacgccaaaagatgttgaagaaagctttttggtaagaagtgaacgatatattttatataaaacgattttcaatgaattgggattttcaagacaaccatcaaaatcagaaaaagaacttatggacacctggtttgataaatttaatatggatatagatttgataataaatgcatgttctaagtctaagaatatttcaaacccaagtatatcttatataaatggtataattaaaaattggaatgaaaaaaatataaaaaatttaaatgatttaaagcaaaaagaggaagaacgtatagttaaggagaatattaataagaagcagattaatactactcaaaacaacaatacttacaaaaaaactaagtttcataatttcaacgaaacattcactcagtatacctctgatgagctcgatgagattattaaaaaaagtcaaaaagaaaagtttaagtaggtgattaaatgaatgaggataaaataagaaaaatacttgctaaatatgctaagagaagagatgataatgaactcttattagaacatagaaaaaatgaggtatataatagaatccctgagataaaatctatagatgatgaaatttctaaaataggtctcagtttagctaagatagtacttttaaatcccaaatctaaagatgaaattgtaaagaagactaaagagaatatagagtctttaaaagtaaagaaagaaaaacttttatctgaaagtaacatacctcttgattacttggaaataaagtttcaatgtatttcttgtaaagataaaggatttttacctaatggagaaaaatgttcttgcctcaaacaagaaattgtaaatgaagcttataaaatgtctaatttagataggattttaagtcaggaaaatttttcgaattttaacttgaatatattttctcctaagaaaggctctgatggggaaatatctcctagagaaaatatgctaaataatttaagtatctgcgaaaattttgttcatgattttaagaaggataatagtgaaaatctactgttttatggttctactggactaggaaagacctatatgtgcaattgtattgcaaaggaattgttagataaaggaaatgttgtaatctatcaaacttcttttagaattttagatattcttgaagattataaatttagaagagacacaaataaccaaataagtgaagataattataaaaacttgtttgattgtgatttattaataatagatgaccttggaactgaacttaataattcttttactagtggggaaatcttcaatattgtaaatacaagacttgttgctggtaaaaaaatcattatttcaaccaacttaacaccatctcaaataggaaatacttacactcaaagaactctctctagaatcttagataagtttaggattttagaatttactggagatgatttgagatgggaaagatttaaataaaatagcccttaaaaaacatttttttatttttaaatagagaggtaagagcaaacttgcttctctgtttaaaacttatgccacataaattaaaacatattttttatttttctatttacatatctaatgtatcttaatctaacaaatcatttacattcttagtagtctatatttattgatactataaattaaatttgctatattacataatactatgctagaatgattctaaattttatatttaaaactatcacattgcaagtaattcaaaattttgttgtatgtttaatttcatttttaatacaataaaaatgaaattaaaaaaagatacttaaaagtatcctgtaacatagaaaattatattaatttgaatttatgtactttgtggagctggtgataggaatcgaacctacaacctgctgattacaagtcagctgctctaccgttgagccacaccagcatataatctagtatttatctctaattcaaaatttggtgggactaacagggctcgaacctgtgaccccctgcttgtaaggcaggtgctctcccagctgagctatagtcccatactggtgactcgtaggggaattgaacccctgttaccgccgtgaaagggcggtgtcttaacctcttgaccaacgagccatattttggtgatctatccgcgactcgaacgcgggacaccctgattaaaagtcaggtgctctaccgactgagctaatagaccacattttttcgacttttttcgtcgtttctttcactcacaagttatattatagcgtctatacaatttttagtcaatagttttttttactttttttagaatataattaaaatcatctttagccatttattttcaacaaaattctttttaaaaaacctatatgtatctacataaattcaactttaatttcagctagaatatgtataagtagctttaacttaataaaaaatcaatgtaagtcaaatataaaagagcatctctaataactataaacattatcttgagatactcttcttcaactattttaaattatttaattgataaaatattaagcaaatatatttcttcttattatagtttgagctctatttggaccaacagaaaccatatctacacttactccaactagttcttctatttttgctacatatttctttgcattttctggaaggtcatcaaagttatctatttgagttatatcttcattccatccatctaattcttcatatacaggttcacattttgctaaatcatctaatgaagctgggaaatccgttattatcttatcgcccattttataagacgtacaaacttttatcttatcaaatccagttaatacatcaagtaacataaatgaaatactagtcaatccattaactctagctgcatacttaactataactgcatcaaaccacccacatcttcttggtctaccagtagttaccccaaattcatgtccttgttctcttatcttatctccagtttcatttatttgctctgtaacaaacggtccttctccaactcttgtagtatatgcttttactataccaacaacgtcttttatcatatttggtcctatacctgcaccaattgcaaatccaccagatgttggatgagaagatgtaacaaatggataagttcctaaatctaaatctaataaagtcccttgtgctccttcaaacaatacttttttacctgctcttactgcatcatatacaataacagacgtatctgccacatattttcttatttgttctgcatatcctagatattcgttatatatagtttcaaaatcaaataattcttcttttccatatatatttttaactattttatttttagcatctatttgagcttttaattttatagcaaatttatctttatccattaagtcacatattctaataccagatctctctgttttatccatataacaaggtccaatacctttttttgttgtacctatctttaaatcgcctctggcttcttctgacaatgcatctagttctttatgatatgggaatatgacatgtgctctatcacttatttttatattttctgtacttatattatccgttttaaacatttccaattcttctaaaaatcctttagggtcaaacactattccatttccgattatattcactgtatttggatttaaaactccagatggaattagatgtaatgcgtattttttaccttctacaactaatgtatgtcctgcattatttccaccttgccctcttactactacatctgcttgagtagcaagataatctataactttacctttaccttcatctccccattgagaaccaacaattgcaactgttttcatgtaattcacctctatattttatatactctcgaacactttacttacttattctatcaaacattcgtatttttttcaacttttttagtattctccaatatttaacatatattcttctatttttgaaaactcttctttctctattatttctttttcatattttataactttttccataaatttatccacatctaaaagtttttctaatttacatatgttaattatgtttccaaagtttgtattagtcatgtttatatgatactgattatccacattattagcataaacaacaatagactctcttaaattattgtcaattactctaaataagtttatttcatcaagtactttaattatattgggatatatatattttaagcttattttttccatattattcctcctaataattaatatttatacacagataaagcaagccaaaagcttgctttatctacttattcacacttatcaacaggctatctgtggatagtgtggatagttttttagctaaatttcaatgtttggacatatttagtgacatgtatccacatttttcctgtagaaagaaaggacgttctgtggatattcgttagattataggtctctcaacttatccccaaatctttgaacttcaccaagccaaacaagttccacagaaccagtttcaccgtgtctattttttgctattattacttctcctatatttttactctcagaatcagcatgataatattcgtccctgtataagaacataactatatctgcatcctgttctattgctccagactctcttaaatcagataacataggtctatggtctgctctttgttctggtgcacgtgataactgagatagtgcaactacaggacagtttaattcttttgctaatatttttagtgaccttgatatcttagatatctcttgttgtctgctttcattattaccttcaccttccataagttgaagataatcaataagcactaaatctagtcctttttctatttttaactttctacactttgaccttagttctgatatttttataccaggagtatcatctatgtgtattttggcatctgataatactgccatagcatctataattctaggccaatcattatcattaagtgttccagtctttattttttttaattctacactagattgtgaagataacatacgttgtactaattgttccttagacatctctaagctaaatacagctacagaggcatcaccttttaaggctgcattttgaaccaagtttaaagaaaaggcagttttacccattgctggtctagctgcaattaatattaaatcagtcctttgaagaccatttatttttttgtttaaatctttaaaaccagtagttataccagtgacatcactcttgttagtatataatttttctatcatatcataggcatccatcaaaactaagtttatagatttaaaatcatcactagttttctcctgtgatatatcaaatatactcttttcagcttgttctaaaacatcttcaatcttagttgctccactatatcctagatttattatttcattagaagcttttataagctttctaagtacagacttttcttttactatatcagcatagtattttacatttgaagtcgtcggtactatagtagaaagacttgtaatataactgattcctccaatatcattaagatgcccttgttttcttagttcttctgttaatgttatcaagtctataggctcacctttattacttaaagttatcatacattcatatattattttgtgagcctctttatagaaatcatcaggctttatagtttctgtaaccgttattatagcatctttatctagaagtatagaacccaatattgattgttctgattctacactatgaggaggaattctcgtcatatcttccatcttaatcacctctagttattactgtttttcttttacatccactcttattttagtagttactttttgatgtatttttatttctacgaaagttgaacctaaagatcttattggttcatctaataatatttttcttttatctacgtctatgtctttttgtttctttaattgctcagcaatttctttagaagttattgaaccaaataatcttccaccttctcctgcttttgaatatatttctatattaatttcttccatttgcttacctaataaaactgcttcttcatactctttttgtgcttttatttctttagatttattcttttcatttaattcttttattgctacactatctgcttgcacagccatctttttaggaaataagaaatttcttgcatatccatcacttacttctttcatttctccctttttaccagttccttttacgtcttttaataatataactttcatctattcttcctcctccaaatactcctctattattttatttaccatcttataagcttcttttagagaaacattttttaactgtgctccagctatatctatgtgtcccccgcctcctaatttttccataagtacatgtacatttatttgccctaaagacctcgcacttataaatatagtatcatctttttcacctaatacaaaggaagcttctacttctttgatatttaataactcatcagcagtttgagctattataacatttatactatctatctcagtacttgaatatgctaaacatattctattattaattattttagtactttgaattatttcagcttttattatgaaatcttttacatcagaattgaagaatttctttacctctatagtatctgctccaacttttctaaggtaagaagcagcttcaaaagtcctaacacctgttttgaatgcaaagtttttagtatctagacttatacctgctaaaagcccttcagctgtaagtttatttattgttacatcttcatccatatactgaactaactctgtaaccatttcacacgttgaggatacatatatctcatggaataaaagcactgcatcatttataaactccacacctcttctatgatggtctataactactaccttctctgatagctttaacagttcttcacattcagtataatttggtctatgagtatcaactactacaactaatgtatttttagtacagttgtcaatagcttcctcttttccaataaacagctttttatagtaattattttcatttattttatttataaatatttctatagattcatttacagattgtaaaactatgtttgcagttttgttacaggatttacatatatcataaacaccaactgctgctcccatagcatccatatcaggatatttatgccccattatataaacttggtcactttgttgtataacctctcttaaagcatgacctattaatctggattttactttggttttcttttctacagctttagattttcctccataaaacacaaatttatcttttgtttttacaacagcctgatcaccacctctaccaagtgctaaatcgagagcacccgtagcaagttttaggttctcatttaatgtatctccatctataccaattcctatacttatagtaacaggaagattatttccataatcaatatgtcttattgtatctaaaatagaaaacttctcagcttccaatttttttagctcttttttatgcattaccaagaagaatttgtcttttgaagttcttctcaatgcaccatttgaatttaattctaaagcagaaagtattttctctacttcaacattaattaaagctctcttatcttctgctgcactttttaatacttcatcatatccatctacttgtattagcatcattgcatttttttcatcatcataattttgttttacttttaaatattcagtcttgtctatccagtataatatcatcaaatatttaggatttttttcttgatcattttttataacattataaattattgtatattctttttctttatagtttatttctgtgtacatctctttattttcatttaatacttttcttaaattaagatttttaactatatcctctatatttttatcaagtaaatctttttgaccaatcatatcataaaactttccattataccaggatatatttccatcaaattctaaaatacataatggtattggaagatttattatggcttttttagttgtttcatctatatctaaagataaattttgaatatactctgtccattcatgacgtctaatattagtagttctccaattgtgaaaaaccatatatacaaaaatacagaaaaataaacaccctacatacaagttgtaataaagcaaaattatactagaaataccaataacaattatatataaatttatttctggcatatttaatttaaaggtttgtttgttactcatttctatcctcctaagtggatttatagcttcttacctttctaaagtcaattatactatctaccataccaacaaaagatattcccataaatccaaataaacataaaattatccctgaaaaaaacataattttatttggtccctgtcttatccatttctttaagaaataaatgcaaactgctataccttgaattacaaacattaaattaaaaactagctgtaaattagtcattattaattctgtatataattttgaaccaataatttgaataaataagactaataaataaagtaagaaagttgtgagtatagcatttcctggtaaataaaaatcagcaaatttaggaaatcttatattcatctttgtaatcctttttataaaaaatacactcaaataatatgtgacaaacgctgataacaacccttgtaaaaataacatcattggtagcatatttgtaaaataacttacaatctcatctggcttcattttatcaaacactttaagttcagttgcagaaaaactatttttttgaatatttacaatttctgatatcatcttagaaacttcatctaatagattcacatttaaaaatgtctttaatacaaaaaaatatacaagcattgaaagtacaaatattatggttccaccatatatcggttcgaatttattactgtcctcttgttcaaagcttctctttagcatctttcctattactatacctggtaaagaatacattatacatatatttaatgcataagaaatgtctgcaaatagaatcagtacacaaaatgtaaccaaaatagatataagagaatactttctatcagtaatagcacctataattacatatggaacagctgctaacatactaaatattcctagcattggaatataggctattactaaagcgattattatagctaaaactattatagacattgccttagatagtctaattttattattcaatttaatatcactccctattatccatatgtttttttaaattagataaatctccataccatctttcaacgctatggtcctcatctataccaatttttattttttccttgactttataatccacatctctaaaactaattcctaatctctttgctaagagatatgttatcattattatatttgctaaagtatcttgaattgcttcatctaatggttttacccctttaaacaataaattaaacaaatcacttacactcattaatatttctgttttcatccattctattatctttatgtttctcgttatctcagaacctttatctattttcacgtttacaaccctccttaatatataatattatatcataaataataatatatttaagtatataaacaaaaaaacgagctttatagctcgcctcatttagatatataaatacatataataaaaaatgagcacaaggctcatttttttagtctaatgtatatggtaaaagtgctatatttctcgctctttttatagcaactgttaattctctttgatgcttagcacaagttccagatattcttcttggtaatatctttcctctttcagttatatacttttgtaatctttgagtacttttgtaatctattttagcgtttttgtcagcacaaaattgacaaactctttttttcttacgtcttttcttattcatcatgacttttttccctcctttttaaaatggtatatcgtcatcatctatagcttgaaaaccttgtgggtctaaaccttgaggttcaaagcttggctcaaaagctggagcactctctctatatgaattttccgatttatttttactatccaaagcttgtactgatctagtacttacttttgtaaaagttctcttttcacctgattgtgtctgataattgtctactcttatagatccttgaagtgctactaatctacctttagttatgtagttagcacaaaattcagcagatttccccattacttcaacaggtataaaatcagtttctttagatccatctttttttacatagtctctatcaatggctattgtaaaggatgccactggtgttcctgtacctgggatgtatcttaattcagggtctctagtcaaccttcccactaatacaacttgattcataaaaacaccacctattttttataataaaaccagttattaagcaacaactatcatgtgtcttattacgttttcatttatctttaagtttctgtctatctctttaggaacgtctactgctgatttgaagttaactaatacatagaaaccttctgtaaacttagctattggataagctaattttttagttccccaagtatcaactttaactatttctccgtcagttgcaacaacttccttaactttgtttagtatagcctctcttacttcttcatcagaatttggctttaccacataaactaattcataatttctcactataattcacctccctttggacttaacggctctacactcttagagcagagaaatgagactaaaatctcatacctacacattttatcatttattcttatttctgtcaatttaaattttggacaaagtttagtataaggtgaattatatacttttcaaacaaacaagggatggcaacaaccatcccttgtattatatataagttattatttttaattaagcttctacacccatagcttcttttaatacagctgctatattttttataccttctattattttttcttctggcatatttgaatagttaagtctgaaagtattttctctaccaccattagggaagaatcctcctccagcaacataagcaacattcttctctaaacattttggcattaattctttagcatttaaattacttggaagctctacccatgtaaataatccaccttctggatgagtaaatactaatccttctgggaactcttcttccatagtcttaagcattacatctctacgtttaacataaactgcttttattttgtcaacatgtgcatctaggtcatacatatccataaatttgcttacttccatttgagatatagttgatgcttgtaagtctgcaccttgttttgcaaagttaaatttagataaaatttctggagaagcacaagtccatcctaatctgtatcctgggcagaatattttagagaaagttcctaagaatattactaatccttttgtatccattgattttaaagatggtaaagtctctccttcaaatcttaaatctccatatggattatcttctattactggtatttcaaatttatttactatttccatgaattttttacgtctttcaagtggccaagttcttcctgttggattttggaagtcaggtattacgtaaatcatttttattctatcagttgtttctagtatcttttctaattcttccattatcattccatcagaatctgttggaacatctatgaatttaggttgataagatttaaatgcgtttatagctcctatgtaagatggactttcacataaaattacatcaccctcatcaataaatacttttcctgcaaaatctagaccttgttgagaaccacttgtaactaatatatcatctttgtttacattagttttgtttttatcattcattctagctgctattttttctcttaatggttcatatccttctgttgtagtatattgcatagctgatcttccattttcttcaagcactgcaactgatacttttttcatttcctcaactggaaataactctggagccggcattccaccagcaaaagatattatttgtggttgttgagtaagttttaaaagctcacgtatttctgatccttgtaatccttgcattctttttgcatatttaactgccataattaaagcacccccatgaaaatgttttcttcaattcttattataccaaaattttggatattaatatacggtatttgacattttttaagtgttaaatttttatcacttttttattagcttttttactctcttttctaaggtctctctatcaagcattattagccttgaacatttagtacattttatctttatatccattcccgttcttatgatttcaaactctttacacccacatgcatgttgcttttttaattcaacaatatcacctatttttaaatccattggcataaataattagcctcctaatctaacttctctacttcttttgaaccattttctaatttacttatacaataaattccttttatatctacattattttcaaccaaaatagtttttatcttttccatatcttcaaaagaaaatttaattgatattccacaacttgctgttatttctcttggtgttggaagagccattacttttagactattttcaccaaataacttttctgatcttatcgcatgatgtgtcgaattaaatgacactatatacatttgattcattacttaatcctttctgactatctatttgagttaatctttattattagttttatattattaaacaaacatacattatatagaaatggtatttgatgcattctttaatgtctcaactatagtatacatatttgtaactgtacctacttgtaatttgtcttttaaattataataatctaaacaagtaccacaagataaaacttctacacccatattctcaagtatttttagattttctatggtttcttcattttcagcacttaattttactcctccattaactaaaagtacatacttaggataaggtttagattctgttaatgtatatataaatccttttattaacacttttcctaattcgtcatttccaagtcccatcttatctgaagatataaatatacatgtattgtctaattcactttctttattatctacaacattttgtttatctagtatatttttaccttttctaatttctatagatataaaattctctttttcgtcaacaatatttgcttcacaacttaaagatttagcaagttttaatatattctccttagctgtttcattatcaactattgtaactacaacaccttcttctaggttatccaattctctttttgtatttataactggtttaggacaagcaagccctctcgcatctatttttatactcattgtctgattcatctccttaaaaatattcatacaatttatattttatcatagatattatcttgcttgttatagattgtttctatacccttataggtttatttaccctacattatttctaaatttttgtacataaatacacctttttgataatattctaactctttttcttttgatatatttgaatataattgacctaagtctatatataaattggccaatattctattgttgcctaaatctgatactatttttatgcatttaatcagatattcaattgcaagagttacttcattctgatttttatacatattagcatagaatctcaatgctttatattcattgaatttatttttattttttattgatgaagctaaggctatcttacaatattttctagctaaatcataatcttctttatctatatatgcttctattatcttaaataatcctgacatcatgtattcatcttcatcatttttctttatgtcatataccttttgtgaatattcaagtactctatctgtttcacctatttttctgtaaacatcacaaattgttaaatacacatttgctaatccagttttattatcctcactctcaagtatttttagtgcttttttaaagtaatctcttgattcttcatattttccaatctcaagcatattatttgcttttaacaccaaaatatcgacatcttcttttctatcatttctattatctatttcatttatcttttctatgtacttcaatgacatatttggattatctagttttatgtaacaatatgccatcttactatatagttccttgtgtatgttaacatcctcaaatttattctctgacaaaatttcctctgcaaaattaaagtggcttatagcacctttataaaagtcttcctgcatatatattttccctatgtttaaataacacttaagtatattttcactatcactattttttataaagaagtacaatgccttttcaaagttttctatagcatcattataattagattttttcaaattaatattagccattaaaaaattacatctgccatagttctccattaaatcgtatctcttacatatatctaaaacttcttttatttgatcctcagccttgtttaattcattttcttttatataaatttcgctctgtagtattaaattatcagttatcttttttgattgcatttccttggtctctaataagtattctacacttacatctagcttatcgcctagatattccaacagttcataactagtatgagatttatccctctctatatggcttatttgtgctgctgttatcctatctccagctaattcttttaatgtcatgtttttttcttttcttaattttttaatcttttctcctaagctcaaaatttccatactattcccaccttttgaagacatttttttataatataattataacttatatttattttaaaaacactacttttattttacaatattttcactgtacattaaatgatttcccataaaaatgactaaaatttagtttattttgagttttattaatttaaataaatcattttttaaatttgttactattttgtattcatatatttgctcataacgactataattatatataagaatagtttttaagagaggagaaatttttatgaaaaataagaaaataatgttagtgttaagtatattatctatatctatattcgcagttggttgtactaatgctcaaaatggaagtgatacatctaaaaaagaaactaagagcaatacaaatgttgaacaaccaaaagaagaaaacaatactgaaaaagaggttcctaataacaaagctaaacctactccaaaagaagaaactaaaactcaatcagctactatttactcttttgatgtagataagacagatttaattgaaaataaagttgatttaaataaaattgatgagaacactttatttgaagaacttcaaaaacttaaagttgttccagaatctgcaaaattaaattcatttactacaaaagacattgatggtgtaaaaactggtatattagatgttagctctgactttacaaagtcaaacttaggtagtgatgcagaaactttaatgcttgattcagttgctcgtacttacataaaaaatatgaatgttgaacaaataaaaattactgttgatggttctaattacgaaagtggtcatatagttcttgaagaaggagattacttaaagtaatttcttgaaacaattatcaaatagattagaggttcttaggagccccttttcttttttgtacaaaaaaggagatgattcaaatttttattttgaaatatcccctttttttatttctatattattaaatctcatgctatttattttttgaaatttttttcaaagcttccactgctttatctatctcatcttttgtgttgaaatatcctatactgaaccttactgcaccttgttttaaagtacctaaagtggtatgtgctagtggtgaacaatgtattcctgatctagttgctatattataatcactatctaataagaaagtaacctctccagaatccatatctcctatatttagagcgattactgatgctctttttttactatcctttggtccatatatctttatatctgatacttcctctagtttgtctatcatatattgacataattcttcttcatgttgtcttatattgttgattcctctttcaaatataaatagtataccttggttaagacctgctatacctggagtattatgagttcctgattcatacttatctgggaataactctggttgaactatttcttctgatttactacctgttccaccttcttttaatatatttaagttcaacccttctcttacatataatatacctgttccttgaggcccaaataagcatttatgacctggcattgccaacatatctatattacattcatttacgtctatatcataaacacctgctgtttgtgatgcatctactaaaaatagtatattatgttttttagctatttctccaactttttttatatctattaaagttccacatacattagatgcgtgtgttgttacaatcagtttagtattactctttattgatttttctaaatcttcataatctaaaaatccctcataatcgcattttactacagtattttcaataccccttttttccaatgcttttataggtcttattactgaattatgctccatagacgttgttattacatggtctccttcttgtaatacaccttttatcgctaaatttaaagaatctgttgcattagatgtaaatactatattcataggattacttacattgaacaacttagctatattctctcttgtatcatatatctccctagcagctctcatagcaagtttatggcctgctctacctggatttgcacaataatttttcatacaatctaaaacagcattatacactctttctggttttggatatgtagttgcagcattatctaaataaatcataacaatcttcctctctgttttatatttttgttctattcaagaagcattgatacaatactatttaaatcatcatcattatagtattctatctctattttacctttcttctttcctttagaaatattcacctttgttccaaatatatttctaagtttatcttcaacatctaaaataaatacatccttaggtttagattttttaggttcttcttgtttattttcagatatttttttagctatattttcgacttctcttacagaaagttcttcttcttctatctttttcgctatttgaagttgcaaatctttatctgcaattctcaataaagccttaccatggcctgctgtaattctaccactgtctatcatttctataacatcttgtccaagatttaaaagtcttagtgtattagttatatgaggtctactcttcccaacagcttctgatatttcttcctgagttacattgtaatgctctattaaactcttatatgctagagcctcttctattgaatttaaatcttccctctgtaagttttcaattaaggctatctccattatatctttcatatctatatctttaattatagcaggtatttgatttttatttgcaagttttgatgctctaaatcttctttctccagctattatcatatatttattattttcatccattttaaccactattggctgtaaaacaccataattttttatagagtccgacaatacttttatcttttcttcatcaaattgctttctaggttgaacttcgtttggatatattttgtctatatctatgttgactatttctttttctgaagtttctcctttaatttctggtatcaatgcactaagacctctacctaatctattacttcttttagacttattctccatactaccattcctcctcttctaaatctataaattcttctgctagctccaaataagctacagaccctctacatcttttatcataataaattacaggttttccatgacttggagcttctgcaagtcttacatttcttggaattaaagttgtatatacactacctttaaagtatttcttaacttcttcaactacttgtattgataaattagctcttccatcaaacatacttaaaacaacaccttgaatttctatatcagcatttaatcttgattttactaattttatagtctccattaattgactaacaccttctaaagcataatattcacattgtattggaattaaaacactatctacagcagttaaacaatttattgtaagcatccccagtgagggtggacaatctaaaaatatataatcatattcatctattaccgcttttatggaattttttaaaatatactctctattagttttagatgtaagctctatctctgcacctgatagttcagtagctgatggaactacatctacattctcaaattcagtacttattattgcttctttaatatgtaacccatctaacataatttcatagattgtattttctacttcgtttttattaataccatatccactagttgtatttccttgtgggtctaaatctaatactaatattttctttcccaaagttcctaagctagcacttaaatttacatttgttgtagttttcccgactccacccttttgattgaatacagctataactttgcccatgatgttcccccctttaagaattaaattaattttaaatgttgaataggtgttttttaagtataaataatgtctataaatcaatttatattacaaggcttatattacaaaaaaagattactggtaagcagtaatctctattttttagggattttcacaacaacttccatataatctcccttatctatttcattatacttagcatcaattcctgtatttgatatagcatcaaaggcctgctttatagtatttatgtaaattcttatactcatagcaccctttatattctgttttttatcaggctcttcttgaactttagtttcttctaatacatcttgtatcaatttttctgtttttttaacagtcaattcattttttatgactttgtctaacacactttgcattaaatcttcacttggtagtttaagaaatgctctagcatgtctttctgttaaattattctctattagcttcatttttatatcgtttggaagctttaatattctaagcttatttgctacagtagattgatttttgcccaatttttctgctaattgctgttgagtaaaagcatgttcttttattaagttttcataaccaattgcttcttcaatgaaatttaagtcttctcgttgcaaattttctaataacgctagaacagcagaagattcatcattcatattatttataattgctggtatggttttaagctctgctaatttagctgctcttaatcttctttctcctgcaattagttcatatttgccatcttttgctctaactgttataggttgaattataccatatacctttatagaattgctcaattcctccaatgaaacttgtgaaaatatttttcttggttgatatggatttggaactacatcttctataggtatctccataactcttttatcttccataacatacctctcttattttagatataaattatttttgttctctatatgtacatacaaatttatttctgcatctactttaataattcctttatttttgtttttttacggtaagcttaattatttcctaagaaataattaagcttaccaataataattttttcattacttttttcattacttaataggatttttagctggtctaccagcttttctagggtacttaactggtgtttccatcacctttttaaaaactaatatattatgatttaaatctacctctggtaactctacatctattttttcaatatactccaatcctaaaacatcaatagccttttgtgattcttctagctctaaattagcattcggaccttttaagcaaataaaataccctccaacttttacaaatggtacacaaaattccataagaatcggtaatccagcaacagctcttgccgtagcaacatcatatttttctctatagtcttcatttttaccaaaatcttcagctcttccatgtataaatgtaatattatctaactctagtactctactaacttcctctaaaaagtttattcttttatttaacgaatctaacaaagtaagttctaagctatctaaacatattttcaatggtattccaggaaaaccagcacctgtaccaacatctattatagacatcccattttttatatatccattctttacagctgaaatagagtctaaaaaatgttttatatacacttctttttcatcttctattccagtaagattcatctttttattccattcaactaatatctctctatagattttaaatttttctaacatactgtcattcgtatctatattaaaaccttcaatcccgtttttcagaagttctatattattcacctttgccacctctagttcttctgacttgttctaggtatataagtaaaactgatatatcagctggagaaacacccgatatacgagatgcttgccctattgaaataggttttatatcatctaatttctgtctagcctctaatctaagaccttctatagatgaataatttattttctcatccagctttttattctcaagttttttaaattggtctatttgtttcaattgtttctctatataaccttcatatttagttattattacacactgttctttaacttctcttgaaacatcttctccagcgcccttccctaattcttcaagcaattcgtaagtaacctctggtctctttaaaaattcatatagagatattccaacctttattggtgttgctcctttttcttctaacaaactatttacttcttttggtgtaactctttcattttttaatctttcaaattctttatctacagcagcctttttatttaggaacctttcatatctatcttttttaactaatcctatatcataacctttttgagttaatctcatatctgcattatcttgtcttaaatatagtcgatattctgctcttgatgtcatcattctgtaaggctcgttagttcctttagtaacaaggtcatctaataagacacctatataagcttctgaacggtctaatacaaacggctcttttccttctatctttctaactgcatttataccagccataagcccttgagctgctgcttcctcatatccagaagttccattaaattgccctgcactaaataagttctcgacaccctttatttccaaacttatttttagttgagttgggtcaacacaatcatattcaatagcatatgcaggtctcattatcttacaattttcaagtccctttatagttttgtacatatctaattgaacttcaaaaggtaaactagttgaaattccttgtatatacatttctttagtatttaacccttctggttctataaataattgatgtgaggttttatcactaaatcttactactttatcttctatagaaggacagtatcttggaccagtactttctattactccactatacatagcagacctttttaaattatccagtataactttttgagtttcttctgtagttcttgttaaataacaaggttcttgttttttttctatattttcattcataaatgagaatggagttactttttcatcgccctcttgtaaagacattacagagaagtctatactatctctatgaactcttgctggagttcccgtcttaaatcttctcattctaagaccaagctcaactaagctatctgtaagatattttgcataccccaatgcattaggaccttcataaaatgcaacttcacccatatatatctttgagttcagataaactccagtggccaatattacagctttagatttaaatgaacatcctagtttagttccaactcctattacaacatttccttcatgaagtatttctacaacttcatccatagctatatcaagatttggttcatcttctaatgtctttttcatttcttcatgatatttaaatttatctgcttgtgctcttaaagagtgtaccgctggacctttggcagtatttaacattctactttgtatatatgtcttgtctatatttaatcccatctgaccacctaaggcatctatttctttaactaattgacctttaccagtccctccaattgatggattacaaggcattaatgctatggaatccaaagacattgttattatcaaagttttatatcccattcttgcagtagccaaagcagcttcacatccagcatgtcctgctccgactactataacatcatattttcctgcttcaaactttatcatttataattcctttcttttcaaaattaatgtttcatgagaaacacttcaaattttttaaaaatctctataataaaaacaaatttacttttgtacattacttaccaatacagaaattatggaatatattatctagtaaatcctctgttactgtatcaccattaatatatccaagatagtcccatatattttttaaatcgacttctacaaagtcaaatggcatactttgttccaaagcaattaaagcatctgttgcagatttatatgctttactaagtgcatctttatgtcttgaatttgttactactaaactagaattatttttgatactacctttatataccatagactctattttatcttgcaattcttctattccttcttgttgtaaagctgatatttttattatactattattttctacatatttaagtattttttcttcttcaatctcttgtttcaaatcattcttatttaacagcactattgtttgtttatccttaagtttttctaatatctctatatcttcctctgacaactttctagatgcatctaaaaccattactatcaaatctgcactagtaaatgattctttagacttttcaacacctattttttcaacgatatcatcagtatcccttatacctgctgtgtcaacaatttttaaaggtataccttttatgtttacaaactcttctataacatctctagtagttcctggtatatcagtaactattgctctattctctcctaaaatagaattaagtagtgaagatttacctacatttggtttcccaacaattaccgtctttaagccttctctaagtatttttccactttcagctgtatcatataattttttaatctcttttttaagttcatcagttttttctttaagagtttgatatgttatatgctcaatatcttcctcaggataatctatagcaacttctacatgagctaatatctcagtgactttatctctcaattctcttatcttctttgataaagaaccctctaattgattttgagcaacttcatgagctatatcagttttggcttttataacatcaattacagcctctgcttgagataaatctattcttccatttaagaatgctcttttagtaaactcaccagcctctgctaatctaacatcttttgatagtattaattctaatatcttctttaccgaaataaatccaccatgacaattaatttctataacatcttctcctgtataggagtttggtcctttcatatatgccaataaaacttcatcaattatattttcattatccaatatatttccatatattaatgttctcttattgtattcttcaatactctttcccgacatagatttaaagatttcttctgcaaccttcaaagctctttctccacttattctaagtatacctataccaccttctccaggtgctgtagctattgctgcaattgtatcatctataaacaaatttatcacctcttaattcataattttttacatataggtttacatttaaccaatcattaatgatttaataatattaaaaaataaaaccccctaatgtttaggaggttgactttatcttttacactcaattactaatcttctatatggatcggttccttcactatatgtaattacatatttgtcattttgaagagctgaatgtattattcttctctcatatggattcatataatctaattttttagtttttcttgttttcgctacttctctagcaactttattagcatatcttattaaagattcttctcgttttgatctataattttctatatctacaagtactcttgtatgagaatctttatttattttattaagagctaatccagtcaaaaattgaatagaatctaaagtttcccctcttctaccaattaaacttgcagcttctttgccttcaatatcaaccatgattaaattatctttttgagatacattgactttggcatcaacatttgcatttttcaacattacctctataaaatttttagctacatctacttccctctcgataacaaaaatttcataagtaccatctttagcacctataaaacctaaaaaccctttacttggattttcaagtatttctacttctatatcctctgcttttaaattcaactctgctatagctttacttatagcttcctctttactcttactttttattaattttaggctttttctcattaactttttcctccttagagttagcagccagtttagcttttaaaggattcattattaagtaatattgagctattgagaataagttacttactgtccagtacaatgtaagtcctgctgggaatataaatccccaatagaaagacatacctgccattacatatgtcattactttcatagagccttgtaactgatctttgggtgtcattactttttgcatgacatatgcacttgctcctgaaaatactgctaatacataatctggtgatgttaagctttttatccataaaaacccattgtcagctgctaaaaatgcagctttgtttgcaaaaacgccatgagcaactggttctctcaaaacgctaaataatcctattaatataggaaactgtattaataaaggtaaacaaccagatagtggattaattttagcttctccatataacttaacaatttcttcattttgtttttctggcttatttttatatttttcttgtatctcttttatacgaggttgtatatcttgcattgcctttgttgacttagtctgcttaattgttaatggtaataaaataatctttacaagtatcgtaaaaagtattatagaaataccataatgattaacaaattcaaatattaccttaagaatcaatcctaagaaatttcctattatattcaatttttttatacctcctaatagttactctcttttattttagagggtcgtaacctcctggatgaaaaggatgacattttaaaagtcttcttatcgttaaatacataccttttacaaatccatattttttaaacgcctctattgaatattgtgagcaagttggataaaatctacaggtaggtccctttaagggagatatatacttttgataaaatctcactaaataaatacataaattcgataaatacctacttatttcctttaatatataaattattttattcaaagtcattaacctccatatttatagcatacaattaaatagaaatatccgttcttttaactaaattttttatagacttgtctatgtctttaaaagtagcatccttactagatacccttgctataaatactatatcatatccaggcttaattttttcatcaatatttaatctgtaggcttcttttattaatcttcttactctattcctagtaatagcttttcctactttttttgaaacagaaatacctactctactataatctgatttatttttaagtatatatattactaaatatttgtttgcaaaagatttgccgtgtttatatacttttctaaaatcagagtcttttttcaaccctttagtcctattaaagtccatagttaacctccataaacacagctatgaattgtaattatttacacaaaaaggccacctttgcagcggcccttttgtaattaatgagttaatctatttcttcctttagctcttcttctctttaacacgtttcttccgttagacgtcttcattctttttctgaaaccatgttctttacttctttgtctcttttttggttgataagttcttttactcattattttgcaccgcctttcagattttattttccgtttataaaaataataactttaccctcaaagtaaacataacacatataattataaatacttttactactgttgtcaacgagtttttgggacgcttatatcacaaaatctaccatatatatattatgtattttttttattgaaaatactagcaaaaatctatttaattttattctaaattatttttttcaattatatacacaaataaagtaattttaacatgtttatatttttatcaacaattagttaatattgtggataaattagttacaaatcattgaagtttgacatatattttgatattataaatatacttgttgataatgtgcataaatgttatcaacttattagaaattattcacagcttgtggatacttttgtgtataacttttaagattactgacaatactctagttataatcaccatttattgtatgtttatgttatttataactttatctacatattgtttatatcttttcatatttttttaataatttatactattattaatttatcaacaccattatccataaatttagttattctgtaaaatttatatatatttttgcttttctgttaataactttgtggaaaatattaattattctgttcggaggtttatattgcttgtggagataataaagaaaaatttgcacttgttataatgcacagtgttatatcaactaacttagaaaatttaaatcttgttgctaggttaaaatatactgacccacaaggtattcaaagagaaatgaaattaggaacttggggtggcaaattagtcttaattgatgacaatatgccaactagagaggtcgctgaaagttcagagggttcaaatgatggatacacagagtatacgacatatgtgcttggggaaaattctattgacttcgaggatgttggtgcaaaagtcccatatgaaatggatagagctccaggtaaaaatggtggagaagattacttatatagtagacaaagaaaagtatttgcgccatatggtattagctttactaaaaaagcagttgcaacagcatctccaactgattcagaactgaaaaacggagcaaattgggagcttgtgaatgatagttcggatgggtctaaaacttatatagaccacaaagctatacctattgctagaattatttcgagagggtaggctatgaatatgtatatagactatgaattttatagcgctcttgggggagaaatcccccaggacgaatttaataaatatgcaataagagcaactaagtatatagattataatacttttaatagaatagaagaagttacagaagaaataaaaatagccacttgtgagattgctgacctcatatataaaagcaacctggaaggcaataaggaagttcagtctgaaagcattggaagtcattcagtgacttattcaactaacaataaaacgatagagcaaaaagcatatgatattttaaaaatgtatttagattcagatttgctgtatcgaggtgtttagtgtgttttttaaagataatataactttatataataaatattatgataagtcctctgataaaactttatacaagaggacttatctatttgaagtagattaccaagaggctaaaaatatagctgttacagacaaggggttgttaagtgctgatagtgttaaggttgtagtccccttttctgtaaatgcaagagggaagaaatatatagacccttttaaatattatgaactagaagaaaatgaaaagaataaattttatacttttaaagttggagatattattgtgaaagaggtcgtagactttgaaataactagcgttaagccttacacattaagagaattacaaagtaaatttgatgatgttagtattataaaatcggtcattaaatgcgattttggaagtataagaatgagacatttcgaattggaggcagaataatatgggatgaatgttcatgtagatattaatgcaactagaataatgagagcaaaagggcttggaagagggggcaaggcacaaaagtttttgactcatgaagttagaaggctttcagactcttatgtacctaaacaaagtggaacgctgaaaaatacagctagagaagaagttgacaagataatatatatacaaccttatgcaaaaccgcaatattataataatgcagggtgtggctcggagggtattggagcaggagggaaaaggggcaagcattgggaaaagagaatgtacgcagacaaaggggacgaattaattgggtctgttgctaaatttgttggaggtagaagggaatgactttagttgaaagtgttagagagtttataaaaaaatgtccctatttggatgaatttgcaaaaagtataaatgtcgagtttttaggtgaggaatttacttcttatacattagagactgttccatcagaaacagtcattaaaagatttataaatggcgactctataaaacagtttatatttatatttgcaagtagggagtgttatgggtctgatgttatgcagaatatagaaaatagccagttctacgagcaatttgcagactggatatatagagaaaatttaagtgggaatttgcctgttttgtctggtgataaagaggcaatgtcactagaggtaagcactccaggatacccagttcaaacgggtatagatacagcacaatatcaaatacaattaaaattaaaatattttgaaaaaggagaaatgtaaaaatggcaggaatggaaacgatacaaagatatagagtagcagactacttaggagttttgggggatgatggacaaaattcctgggtattaatgggagcaggatttaatacattagacgaaaacccatccgcacaaagtgactctaaaacatatataaacgatagaaacagtactagcgctatcaaatcttatcaaacgcaattttcgtttgaaactgatttaattaaaaatgaagaggcgataatggaactttacaaaataggtagagaccaggcaactggcgcagatgctgaaagagattatttaagagtagaattatttttaccaattaaaggcaaagaaaatacttttagggctagaaaatttagagtgtctgttgaagtgagtggatttgctggtgcaggtggagaaactattacagtaagtggaaatttaaataccgttggcgaccttgtacatggagaatttaatactcaaacaagaacttttgtagaagatggagcagaagccccgccagctgaaagtttaaaagttttaactataaattcagttgcaggtactaacacagggaatacaaaaataacagttactccaactcttgaaagtgggaatagctataaatataaaactggggcaaatattacagttccaacacttgatactgattgttcagttgggtacactgcttgggatggtgtagaagaaataacagcaactaagggaaataaaatattaatagtagaagttaatgctaataataaagctaagaaagctggtattactacgattacagtaaaagaataagagggggctaaggaaatgataattaataatatagaattagaagatttagaaatatatgatgctgatgtcatggaaagagttgaaacgtcaataaaaacagctatagacgggatacagattgctgaaacagaggaaaaggaaaatcatgcaatttttagaagaatatgtgatttaatttttgcatgctttgataatatttttggggataatacatcaaataaaatatttgctggaaagcgtaatgtaaaagtttgcatgattgcattttctgaattagctgacgaagtagagagacagaaaaaagaaggcatggagctatttagttctattggtaataagtattcaccaaacagaactcaacgtagagctaaaaaataatgaatatgttagtcgatatacttcccgaaagtgttgaaattgatgggaaagagtataaaattaatacagactttagaatatcaattttgtttgaaatgttaatacaagataattctataagtgacgaggaaaagggggaaaatgcacttcttttatattatcctgtaatccctacaaataccacaatggctatagaaaaaattatttggttttattcatgcgggaaaaaagaaaacaatgtggatgatggttgccgaggtggcgcagggtctagcaaaagtcaaatatattcatatgactatgatgacgagtatatatattcagctttcttgggtcaatatgggattgacttacaggacatagaaaaattgcattggtggaaatttaaagcattgtttaagtctttaaaagaggacaccgaaatagttaaaatcatgggatatagggcaatggatgtaagtggagatatgccaaaggctcaaaaagatttttatagaaaaatgaaaaagatacatgctataccacttcctcaaaacgaggttgaaaaaataaacgaaattgaaaaagcattgctaaatggtggagatattagtaatttattataaaataatatactctacaccttccgaattaatatataattagtatataaatattttaatttgggggggattgttatgggatttaaatttagaaaaagcataaatctaggcggtggattgaagttaaatattaataaaaatagtgtcagtgttagcggtggcgttaaaggtgctagagtttcagttaattctaaagggaaagctacaacaactttaggagtccctggaagtggcttatattaccaggaggtagctaatctaggtggaaataagaagagaaatagtaagagtgtaggaagttcagagagtagtaggcaggctcaacagctattaaaaataataaacgattgtgctaatatagttaatactacaaaagaccctaaaacatttttttatagatataatatgttgttagataagtcatatgccttagttgccatagaggatgatttaaacttttcgggtcaatctcctagtcagatgctagacagcataatagcaaaaaggactgatactataaacgactttttgactagatactacaatgaaatgtctagtaaattgaaagaactgaaaactgaaaaggctcgcatgaacaatgcttataaattctctagcttagcaatagattataaagaacatttaaataatgataacaaagctaagcttaatagactatataaacaactattagatgatgttaaaagacaagattaatatttataaaaagaaaaatataataaaagatttaaataaaaagcacttactttttaaaaaaagtaggtgcttttttaatgcaaatttacaaaaaaaaagggggtggatagatggcagatggttctattattatagatactcttttaaataccgaagacgcagagaaacaacttaataacttagctgataccatgaaaaagaaggcgaaaagcgctttagcggtagctggaattggcgcaagtctaggagctataggaaaacaggctattgacttcggagatgaatatcaaaaagcaatgaatagtttcgagtcagcgacaggaaacgcagaagctaaagcaaaaggctttggagaagcgctacagcaggtttatgcaaataattttggcgaggatatgggcgatataagtgaggtcatgagtttaatatctcaaaagcttgatgggatagatgctagcaatattcaagaggttactgaaagtgctattatgatgagggataccttcgatatggatattggggaaagtttaaatggtgttaactctatgatgcgccagtttggggttagcgcaaaagagtcttataacttgattgcacagggtgcgcaacaagggttaaatcagaatgacgacctcggcgaccaattagcagaatattcgacatattacgcacagatgggtttttcagcagaggaaatgtttaatatgatgaaaaacggggcggagagtggagtctatcaaatagactatttaaatgatgccttgaaagaatttaatattagaacaaaggatggttctaatggtactaaggaagcttttgaggcgctcggttttaatgctgatgaactaactaagaaatttgcgaatggtggaagtagtgcaaaagaagcttttattcaagttacaacagctttgaataacttggatgataatgtattgaaaaatcagataggtgtacaactctttggtactaaatttgaagatttggaagcggacgcagtaacagcgctaacaaatattgaaggaagtataagcagttcaaaagataaattagaagaaattaataagataaaatataatagcttcggagaagcagtaacgggaattggaaggcaaatgcaggttaatttacttcttccaatcgcagaaggattgcttcctgttttaaatgatttagcaaataaatttgctaaggcttttcagaatgagaatactaaaaatgctataagaagtacagcagaaagtattggcgggctaattggaacagttgtaaaattaatatctttagcattaacccctttaatcaatgttataacctttttggttcagcatggtagccttgtagcacccttaatagcaggaattggagttgcttttacaagtcttaaagtagctgggattgtgaggggtatacaaaaaagttttacagatgcccagttggcggtaagaattttcacatctggcgtgactgagtcagaaactaaattgactttgtatcaaatggtagttggattggttaccaaaaaaataagtttggcgcaagttgctaccaatctgtggaaaggagcattaactgcgcttggtggtccagttggcttaactatagttgcggtaactgcattaacggcggtcgttgtttctttatggaaaaataacgaagctttcagagacgcggttataaaaatttggaacaatattaaagacgctggagctaaaatatttggtcagattgctaaattctttacagaaacaataccacaagcactaagtaaggctatatcctttattaaagataattggcaaggattattgctaatgctggttaatccttttgttggagcttttaagctgatttatgataattgcgaaagctttagaaataaagtaaattctatatttaacaaaatcattggtatctttaaaaatgttttaaactttattaaaaacaactggaaaaatataggaagcatgttattaagtccttttgtaaatgcatttaaagctatttataatagttgtgtaaattttaaaaataaggtttttagctttttctctaatgttgtaaaaggcttcgctacttttggaaaaaatataatagttggaataataaacggactttcgagcggtatcggcttggttgtagatactgtaaaaaatatcggtttaattgtagtcaatacatttaaaaaagtgctacgaatacattcaccgtccaaagttacaacagagcttggagagtttgcaggtattggttttgctaatggtataaaaaatacaagcaaagatgtagtagaagcaacaaaagaattaataagcgctatggaaaaaaatctcgataccaataaaagcaaatttgaaaaaatttgcgaggctataacaacagcattaaaaaatcaatacgaaagtcaaaaagatatacaaataaaagcgcttgatgaaagactaaaagttgaggaaaaggcatcaaatgatagattaaaggtctatgaaaaagaatacaatgagaaattaaagtatttagatacagaaacaaatgagaaaactaatgctatacaagaacaaattgacgccatagacaagcaaattgaagaagaacaaaaagcagaagaagagaaagcgtacaatgaaaaaataagcgaccttgacaggaaactagcaacagctaaaaatcaaaaagaacgagaaaaaatacaaaaagaaatatcagaagcacaatcagatagacagaagaaattattagatgaacaaaggcaacaagaaaaaaacagattaaaagaacagattgaaaatataaaaacagaagctagtaacaaaaaagagcagtacaaagaagagtacgacaatcaaaaagaagcagaaagtaaaaaacttgaattgataaaagagtctaatgctagtcaaaaagaagaaattgaaaaatattttagtgaacttttagaagagacaaatattcaaaatgaagcgagaaggctacttttacaaaaaaattcagaagaaattataaaacttttaagtgaatataacccgcattggcaggatgcagggcagagtttagcagatagtttgttaaatggagttaactctaaaaagcaatctatccaggaagctgtaaaggaagctattaacttaaaagagattataccagcacaagaaaaagagcttgatagattgaagaaaaagttagaagaatatgagaaactaaaagaaaaagctaatacttctagcgcaagtggaggggatgtagactcatctgctaaaagttcctctttggattctggttctgccaaactggacgctggagaactagaagaatatgctgatggcatagatgatgttaaaacttctgttgaaggcttagaacttgtcagtgatgaactcgtaacaggaacagtccctaaagttggggattcagctagtaaattatctgaaagtataaaaaaagggttcaatggcattggtggtttttttggtggaatagaaaaatggctaagagatacagacaaaaatataaatgagtggctagctagtgcaaaaaattctattggtgatttcttctctaaagtaaaagataaattcaaagaaggaattgaaaatataggtggattttttggtggtcttggaaataaaataagtgaaggatttgcaggagctggagacttttttacagagtttggagataaggcacagcaaggtttttcaagtataaaagataaagctgtagagattttcggcggtcttagcaattggttcaaagagactgggtcaaaaattggagatgcaattggaagcggattaaaaagtggtttagacttttttactagcacagtaccaaaatggtttgcgggtattggcgacaagataaaagaagaatgtgggaaaataggagaaaaaatatcaagtttctttaatgagacaatgccagctataataaataatattgtcgaatggtttaaacaaattccatataatattggttttgtaatcgggtctattgctggttttttcgttgatttaggagctaatctgtacgcctgggcaacagaaacattaccagaaataataaatagcattgtcgaatggtttgtaagccttccggaaaaaatttcggaattttttagtatcatattgcaaaatattcaaacttggggcgaaaatttcaaggtttctgtttcagagttttttggtgcaatttgggaaaatataacacagttttttacagagctacccgaaagaatttcggaatggtttaatacagtagtagaaacaataagtggctggggcgaaaatttaaagcaattggcaacagatatttttaatcaatttgttgacaatgtattaattccaatttcggagcttccgggaaaattatgggaaaagtttacagatatcatgggaaaagtttcggaatggggttctaatctaattcaaaaagcattagaaacaggaagcaaattcttagaaaatataatgaaattcttttcagaacttccgggcaaaatatgggaaaaattaactaatataatgcaaaaagtcatggagtgggaagttaatttatctaaaaaagctttagaaacagcgaaaaacttttttaacaatatatacaatactgttagccagcttccaggaaaatttagagaatggctagacaatatcatttcaaatgtcataagctgggggactaacttagtcaaacaagctggagaagctggaaaaaatatggcaaatgctgttaaggatgctttgaaagatttgcctagtaaaattatgagtatcgggaaagatgttgtaagaggcttatgggaaggtataacgggcatgggtggctggttaaaagaccaagtccttgattttgctagtaatgttatagatggatttagagacggctttggagtgcattcaccttccataatcatgcgagatttaattggtagaaatcttgtaaaaggggtcggcgttggaatagatgtagaaacgccaggcttgaaagaaaaaatagagaaaaatatatctgaacttacaggtaaattaaaagctacagttaattttgaaacgtctaaaatacaagctaatatagttgcaagtacagattttaaagctggaaaagaaacagctataatgagtaataataaggctgatgaagctaatgaaaatcaagcaggtattaaacttaatatagaaaactttgtaaataatagacaacaagatatagaaaatctttttgatgaaatattgttcttagcaaaaagaaaaggagctttataaaatgttccttttcttttttatatttccttttatcttttttgaaaagactatagtaaaaaatataactacaaaaacggagttatgtctaaaaaataataaatgagaggagggcataaagctatgtttttcgtttataacggtcgagacagcagagaatttggtttaaaaatatacaatataaacgacttatcagctccacagatggaagttgaaagagtgagtgtgccaggcaaagatggagatttactactaaaaaaaggttttgaaaattttacgcttacaatagaatgcgatatagatgcaagacaaagtaatatagaagaagttgcaacagaaataaaaaaatggctacagggcgatatatcatataaaaaactttttttaagtaatagtgacttttattatctagcaagctgtaacaataaactagatataactagaaattttaaaaactttgcatcatgtcttttaacattcgactgctacccttttagatacgcagaagaagaaattataagtttaaatgtattaaatctaaagagtgctactataacaaatttctatagagagtcaaaacctgttctctatatagaaggagcaggggacataagtataaaaataaatactcaaagcatagtgctaagaggggtggcagaaaatggaattttaagcgacttaataatagatagcgaacagatgaatgtatatagaataaacaaagaaaataacattattgtaaatgaaaataataagctttttagtgactttcccatacttgaagaaggagaaaatcagattagctgggaaggggatataaaaagcataaaaataaatcctagatggaatattttataaagttttaaattaaaatttggagggagggattaattattcaaaaaggaaaattagttttatatgaagaaaaagaaacagattttaggcatttaggtttaggtgttcttacgaatgtaataaatgaccatgttagagaggaagaaagcggagttttcgagttagaatttactatctacgaagactcttttttatttaaagaaataaaagtagatagattaattaaagctgatacttcgcccgactacaaagaccagctttttagaatttattatatatcaaaaaatctaggtgggtatattaatgtaaaagcgcaacacattaagtatgatttgcttaataatttcatagaaagtttggaattgaacgatattacttgcgaagaagctttagaaagagtctttcgtgcttgtgaggaacagaacagatttagaggacattcagacatcaaggcaaggaatactattaatattgaaatgcaaagcccttacagcgcaatctgcgagggcgaaaattctctaattcaaaaatttgaaccaactgcgaaacttttctttgataattttaatgttttcttaaattatcaaagaggtgagagtaaaaatgtgctacttgcatataaaaaaaatataacagggcttgaagcggagtatgatacacaagatattgtaacaaaaatatatccttatgcggtctacgaagatgaaatgattacattgacagaaaaatacattgttagtcctaatatgaataaatatgctacccaaaagattgttgctatagattttagttctgatgaggtcagtgttgaagaagaattaagagaaaaatgcaaagactattttaaatacaatcaagttgatttaccaaaagttttatacaaagtcaacttcgtagatttatctacaactataaattataaagattacaaaatgctagaaacagtcaatctaggtgatgaagtgataatacgagattttaatttaaacattaacgcaactgctagagtagttaaaacagactatagcccaataaatcgaaaatactatagtattgaagttggcgatttaataaatcatttagactttttaaataacaagtttaataatatagaaaataaaatagaaacagtaaaaaaagctattgataatgtcaaagtagatgattcagagtttccagacactttaccgaatacaccagctttgacagcagaggggttattcgcttttatcaatctaacatggacatttacaaataagtcttattacaaatatgaagtttatgcgtctcaaattaaagactttgtaccagatacaattaattttacaaatcgaatttttgtagggcaagcaagtgcttacgttcatcaagctgaaccttttcaaacttggtatttcagagtaagagcagtaaactcgcatggaaatgttacagagttctctaatcaagtagaagcacagactacaaaaatcgacgatggaactatgtggatagaaaaaggagcaatagcagatgcattaattggggagttgaagctagatagaggttggtttggacagctaaaaggcatgtatataaatgctagagaaatggtagtcgtaaatgataatggagtcaaaacaatggaaattgatagttttggagatgttcattttaacccaaatacttttaaaattgcttttaatagtgtaagtccttatgttcttattgatgatgaaggattgaaacttataagcgggaagggatttacaaaaatgaccgactcggggctatatacaaaattctacaccggttcagatgtaacagagtcatattatcttcaagaaagtggatacacatactttgattataaagattcaaaaatcataatagacttaccaaaaaaatttgcaggtaaaaattttaaagcaacttgtgcaataaggtctacatcaacaaatggtagctgtttaagttatttcagcacatcagcgacagcaaaaaaaagtgatacaaatccacaattggaactttctgcatctgtgcgaggtgtgtcttacgaaatgtcaggaagccaaacaataggctactggctcggaatgaattttttttcagaaggatttattacagtacaatactatgtttatgcttaaaattttcaaaaaaaaggagaagaagtatggttactattttttacagcaagagaactggagaaatatataattgcataaaatcagagatggagcaggattatacctgctttgcagatagggaagaggattataggcaaatattagataaaatagttgtcgaggatattccagaaattttaaatcctcgtgattataaaattgaaaacggaaaatttgtattaaaggaaaaagaaataataaaagaatttactccaaaaatggtagagtaaaaggagtgataaatttgagagatagaatttatacagtagatattaacactaaaagttaccaagttgcaaaatataagcaatatgataatgcaatagaatttaagattaatttattagaaaataatatagaaaaagatttgacaggatatacagctatagcaaattttcaaagaccagacgggaaaatagtttatcagagctgtactatagaaaattctattgcaacaactataatagaaaataacataacagaagttgcgggggatgtaatagtagagtttactttctacaaagatgatttagttgttactactttttctttaaagattaatatagagaaaagtatagataaaaacagtattacagaagaaccgaaatgggattatatcagcgttacaataaatcaagtaaaagaagtcgtcgaaggcatagaagaaataaaagaaacagaagaagcaagaaaagaagcagaaattaaaagagtcgaagaatttaatagtataaaagaaactttcgactctaaagttacagaagttacagacgctaaaaacagcatgattagtgatgttaatactactaaagatactctaactaaagaagttacagacactaagaatgacttaactaatgttgttactacagctaaagaaagtatgataagtgaagtaactacagttaaagaagaattagaaatcgcagaaggtaaaagggtcgaagaatttaatagtataaaagaaactttcgactctaaagttacagaagttacagacgctaaaaacagcatgattagtgatgttaatactactaaagatactctaactaaagaagttacagacactaagaatgacttaactaatgttgttactacagctaaagaaagtatgataagtgaagtaactacagttaaagaagaattagaaatcgcagaaggtaaaagggtcgaagaatttaatagtataaaagaaactttcgactctaaagttacagaagttacagacgctaaaaacagcatgattagtgatgttaatactactaaaacaacattaatagacgaagttaacacagttaaagcggaagttacaacagctaaaaatactatgattagcgaagtaactacagctaaagaaactatgcagacagaagttacagacgctattaatgcaatccccacaaaagaagagttaaaaggggtaggaatagaaataaaaggaagtttagataatatatcagcacttccagtcaatccaactttaagtgatgcttactttgtaaaaagcgcaacaatagaaaaccaaattgatttatatgtttgggacaacactaattgggtcaaagttcctgacataaaaataaagggtgaaaatggagatggcttagaatttaattgggatggcacgcgactaggtataaggatagaaggacaggagaattatacttatacagatttaaaaggtcaaaaaggcgataaaggtgatagtattgaatttaattggaatggcacacgattaggtataaagatagaaggtcaagaaaattatagttatacagaattgaaaggggagcagggttatactccaacaataggagaaaatggaaactggtggattaataatatagatacccaaaaaccagctagaggggcatctttgaggattttaggaaaattagattctatagataacttaccattagaccctactatcggagattgctggattatagggagaaatatttatatatatcaaactaaatgggaagacttaggttctctagcgggcgtggacggcaagaacctagaatttaattgggatggcacacagttaggcgttaggcaacaatacgaattagattataagtatatagacctcaaaggtgacaatatcgaatttgcatgggatggcacacgactaggtgtaaggatagaaggacaggagaattatacttatacagatttgaaaggtcaaaaaggcgatagcattgaatttagttgggatggtacggagctaggcgttagaatagaaggtcaagaggactatagctatacaaatctaaaaggagcgacaggaaataaattagaatttaattggaatggaagtcagctaggtattagagaagaaggacaaacggaatatatatatacagagcttagaggggaacaaggttatactccagcaatcggcgaaaacggtaattggtttataaatggagaagacacggggaaagcgtcaaaaggaaaagttacatggaatgagttattagaaaaaccgaaagagttagattacattaaaaaaagcacgacttttaattcagacggctctataacagatattttagactcggttagtaaaactataactaaatttaatgcagatgggactatagtagacgaaaaatatatagataatgtattagtaagtaaagtaaaaacgacttttaaaggtaatcaaatagaagaaataaaagaagaggtgagttaatgagttgggcggagacatacaaagtgaatagtgacttgcaaggcgagccactaaattttttaagttatttgcaagacataaaactaaatggattagatagttatgtgctgtttattggaaatgctaggatatgggaagaattatatttaaatagtttatatttattttctgatagaggaataagagaaacagtttacacagctttttcagaaactgatattgataatttatttaataaaagcactaagctaggggaacaattaaatgccttttatagaacagatatatttagcttaggaaatgctgataatgtagtaaaagaaatgactatagagcattataattcattagaggaaaaatttaaagcagggtatgatagatatgttacaagagaacaagaaaagtcaactataggagcatggtttaattctacttttagcttagataatactgatttagaaaatcttacaactatagaagaaatattagcaaatgtggaagctactaatgcaatacttaataatagtaatgcaatagtagctttaactatgtgtaaatcaagcatggacgcagttgtagcaagttcaaatgctatggatttattaggtcaatatattttaagagttacaacagagtcaccagtcattagagcaattttaaaaaataatgtgattagggatgcgattataaatagtgatgaagctatgacacaaatttcaagtaacgaaaactccgtaatggaaatatttaatgacttagaagctacaaaagtattagtgcaaaaccaaaatagcataaataaaatattaactaataatgttactgttgaaaaaataatccctaatttattagaaatgaagtataatttacaaacttctttaaattatataaatacaataaaatcaaatattgcttctggtaaaggtcaaattatggcaataacttataatgaagaaatattcccgattttaaaaaatgcagtaaaaaattatgatggtatggaaaccacacgtaatatatcacaacgagatattgaggaaaaaataaaaatttcggatgcaattttagaaagttcaatcgcaatggcaacttttgcaaataattctattatagtaaataaagttggtgaccgagtgggaattatagaaagtattttcagtaaaacagtgtcattaaatgcttttatgaaaagtacaacagctataaatattttagtaaataaaactactgcttttactaagatagcaaataactctactgctttcaatgctatgctcactatttcagaaaataacgttactattgcaaataatacaacagcaatgggcataattgcaaataacgcacaagctatgtcgacagttgcaaataacgatacgtctataagtgtttttgtaaataatacaacagcaatgggcataattgcaaatagctcaacggctatgaccaaaataacacttacaggacttgcacttaacagaatggttaaaagtaatacagctaaaagcatattaattagcaaaaattcaactttacaaacttacaaaaataatatacagaacacaatacaaggaagtactgcttattttagaactatcacaggctttgcggatgctgatgataacccaccgcaaactattaatagtacttatgtaggcataacttattgttatggatataaaggtaatagttattatggaattgtgtatcatggctacaatacaagtatagaagcaggcagaggaaatggctataaagatgaaaccaaaaagtttataacattaggcggggctagatatgaccaaagcggagacggttattttacttacgcaatgtatcaagcaatttaatgtttataagtcatctaaaagattagattaatagtctaatctttttttatataaaaaataaataatcaaaattaggaggaaagttatggaagaattaataacacaactaagtggactaggagcagtagggatattatgcgctttgctgttcaaaaacactatgcaggagaaaaaagaagatagagatatgtataaaaaaacagtagaaaatttcatagaactatctacacagcaacaagagataaataagaatatacttgttgaaatgggagcaatgaaaacggacgtagaagaaatcaaagaagatgtaacagacataaaagacatgttacagaaagaaggtctttaaatgagagtagcactaacagcagggcatacgctaacaggaaaaggaacaggagcaacagggtatataaatgaaggaacagaaaataggatattgatggatttggttgttaaatggcttaaaaagggtggggctactgtgtatagtggtaaggtagataagtctaataactacttagcagagcaatgtcaaatagccaataagcaaaatgtagatgtagctgtacaaatacattttaacgctgaccatacgacattaaatgtcatgggtacagagacgatatataaaactaataatggtaaggtatatgccgaaagagtcaacgagaaactagcaacaatatttaaaaatagaggcgcaaaatcggacgcaagaggtctttactggcttagtcatacaaaagctccagcgatattaatagaagtgtgtttcgtagatagtaaagcagatacagactattatattagacataaagacatagtcgctaagttaatagcagaaggtattttaaataagacaatagataataaagaaaatagtgaggataagaaaatgtataaacatacaatcgtttatgatggagaagttgacaaaatccccgcaactgtagttggctggggctataatgatggtaaaatattaatatgtgatataaaagattatgtaccaggtcagacacaaaatctttatgttgttgggggtggagcatgtgaaaagattggttctatgactaaagaaaaatttactatgataaagggtaatgataggtttgatacactttacaaggcactagattttattgatagatagattagaaggtagcaactagagttagttgttaccttcttttttttatgtctacttttctttcttcttccaaacaacttcgtatcctatcagattagcaatagtcaagatttcactatacttcatagtctcattatttattttttgtcttaaattctctactgtattattcttattattatattcattcattaaattatttaactcattcatgctgatattttctttcacaagaatacttttgatttcatttttccatgtcattttttcacacctctcttatttatataataacataaaaaaattaaaagtaaaagaataatctatgttaatcaaagttatatttttggaaatcaaagaaaaaactttgaaaaagtgttgacttagatattcatatagattataatataattaacaaataaaacaagggggtaagcaaagaatgaaaactttatttaaagaagcacataaaatagcaagagaaattaaagaaaaatataatgatgtagattataaagtacaatttagtctttgcttatccttcttaaataaaaagggggatataaaaatgaaagaattaaaagggtcagaaaaacaaattatttgggctaatgatataagaacagacattttaaatttaactaacgaactagaaaaaagtaaaatagaaagaataaaaaatgaagactacaaaatcaaagatatgagtatagaagaaatgacagaaagatgtaaaagaaaatttgaaagaataagagaagcaataagcaacatagaggatgctaagttctttatagataattttagaaatgttttaaaatataattctttaaatcaaaaagcgtttcaaataaaccagatttttcgagagtctcaatttacagaagaaattggaaatttaaaatttttaaaaggagaaactcaagcgtctcataaacttagaaaagttgaaggtagtataagctatgaagaagctaaaaaaatagctaaagaaataaattttaatgataattggtctaatgaaataaaagaaaatgtacttgaaatagttgaaatatttgacgacgcagtaaaacaagctactagcacagaatatatagagaaagctaaaaaatacataatagaaacattaatacaaaaaaatgcacaattttataaaaatggatttgcagacattaaaaagaagcagattgaaaactatagaaaaatagaaagtgctgaaagaaaaatagaaattgcataccaaatatttagagatggtgtagagtgttaaaaattttggattggtacaaatatagttcaccgtcgaatgctataattttaatatataaaataaatggaggattgaagtatgaatatagattttagtacaatattaaatttaaaagttaataaagagaatgttgaaatgatagaaaaagagattaataaaatcaacaatgatatatttgatataagtcttaaagattgtgcaaacagtcacgtgggaatcgttaaagaaacagttggaaaaagtttaaacattgaaacgtgggggcatggtgaaattaacagtagcataggaataagattgagatttaatttttattattcaaaaggcgacaaagtagacatagaaaatatagaaaacattttaatatatgtaaatagcttatgcagcaaaaatgtagaaagtgaccttatagctagtgtaagacctggattttataaattagaagagaaatattctacacgcgttgaaaaatgcgaaattagacacgaatttacaggcataaacaaacaagaaattaaagaatttttagagtatcttacagaaattgaaaagagcgaaagaactgttatgtataaaaacaactaaaaaatggaggatataaaaaatgaataaacaaaaagctagaagatttttaagagttatagatatgaatatagataaaatagaggaagaagctataaaagcttttaaagaaagttgtttaatcaaagagactaataatataaaaatttatatcgatatacaaggaaaagttgaagcgatagcagttcaaacttgggctaaacttttaggtgatgacaaagaaattaatattttcacattaaatcaagcgccaactcatttaaacgatatgcttggagaaatttgttacgtaaacgattatgaagaatttgaaaattggtgtgaaaatgagtgggaaaatttggattgggatagttataaaaaattcaataaagaaaatttcgaagaaattgctgaaagaaatatagacgatagcacatcagtttttttagaagaattacaaaaaggcattgaaagttgtaaacaagaattgcaaaatgtaattgaaaattaagtagaagagtattattattaatgtatatagtatcgcttttaagattaactacgagggatttaaaatattttttaatttatttagaaataatattgtaataagaattttaagattaactatgagggatttaaatgtcaatttaatttatatagaaataatataatatccaattttagattaactatgcggaaataaaaacagtgtattcaataaatacactgttttttaatgtttagttattatgataacttaatccttcgattataaatcctacattcgttgtcatctctaattcgttacttaacattattccttgtgtaaattcattgtcagctggcaatgttactctttttctagcaattgcttctataattgtttgaaatagtttaattttcatatcattatcatgtccagcgaatcgtagataattcgttacttcttgcgaaaacttattcaactccgatttagtcattttttcagataactcttttccaatttgcagataaacgttcatcttttccaacccctttttagattatagttaaaacatattatttaaacaatattaatatattgtaataataatattaaaatattacttaaatattatatatacaatatttaagtaatatctaaacaatataaatataatattatttactttttcttagtcttatttcttctatttctctcattgtatatatttaaattctcttcttttatagtgacatcagataaaatttgagttagtatatcacttaataatttactaacgtcgctgttcatatcaatagaaaaagattttaatttgtttacaagctcctcatcaagcgttgcactcatagtcacttttttacttttcttattaactagattatatatgtttaatgtcttattgtctgtagttgtagaatcattttgtacgattgttccatttttcaaaatcggtttttctttatcaactaaaaggtctctgttgaaacttggcatctataacactccttttcttttcaattcttctaacatattagtaaattcctgtctgctgaaatgctctttagttatttttgtataatctgttagagatagtttttttaatagtgccttctctataaactcattttttctaatgtatgtatctaacataatatctctcatatcgttaaacccttccagataagaatcgaaagtatcgctaatttgagttttcttcttctcaaatccaactaaaatagtactttttatattatcctccttatcaaaataggttctatcaacatcccagagttgtttaaataattctgctcctcttaaagaagaaatgtttttatcttgaattggaataattatactatctgctaagaaaagcacatttttagctgtcaaatcgtagcgtggagataaatcacagataatataatcatactcactcaaagtattaaagttttgcatgtaccagcgagctaaaaatttttctctggctggtaaaggtgatagctcttgttcaaatctagccatttgtatgtcagaaggaattaagtctacattaatgtaattttcattaggtgacttgactattgcatcattagcactaatcccttttaaaatatctaatgtagtattatcattatgatttatttcataaacatattgtgttagatttgcttgcacatctaagtcccataagagtatttttttatctttatctttcgcaagttcatacgctgtcattatagacgttgttgtcttatagatacctccttttatgttaaagtacgtaagtagctttgtattagccattttctccacctcattattatatttataatattataataatattgtagtattgtttttataatattgcaacaatatattaatattgttaattacaatattcaaataatataaatacaatatttacatattgcttttacaataccaatatattatattaaaaatactaaaatattgtatatacaatactaaaataatatttttataatattacagtaatatttttatattatagtaaaatttaaaaaaaagaaggctaagaaaaaaagcaaccttcttttatagaaaaagtcattcattcttagccttttcaattattatcctgtcgccctcgaatgttgccgtaacattagggttttctcttgttatgcccatttcatcagcccattttttaggaacactcattctaggagtaaacgacccactcccacctttgtgaaagttaaactttaaatctcttttttctttttccattcattagctccttttttgctgtattacaaagaaaagcaataatacaacactaaaaactaaaccgagcatgttgcttgtactagagtttaatactatagatactatatttaagactatagttatcaaaactaaaacaatgcaaatcttataaaatttatcactcatgtttttttagaaatgtgttataatattagaaagaagtcacctagagagaagggctattccctctaggcttatccttacagttctttcaaaattcttagaactgcgaggattatgttaagtaataataggatgaaggagaaaacttttttaactatgttaaatttgttttctcttttctttttacttctttctaatctccccattcccgttcctcctttcttttatttttttgctttctcacctccttctctataaatatattataccatgacgggtcgtcaaaaacaatagttttctcctattttttaaacaaattttggtaaaaagtaaagattttagtatattagaaatgatgtaaaattgtatctttttttaaaaaatgtgatataataaaagcaaggaaataatgatttactttacacaagagtagctatttccaatgttttgaaaaataacttattttcttaaaccactcttattggcgtttgagtggttttttaattttatcgttcttaaaataaactttgataaaaataaaaaaaatagaatactgaaaatgatgtaaagttgtatcttttaaagaaaatgtgatataataaaagcaagagaactgtattctagtcataagagtagagttttagtctaaaataaaaaattatttaaactttttgaatttgattctcaaatcaaattcccaaccactcttttgcgcagagtggttttttacttgtctaaataatttgctaattatatagaatattaaactagctataacaccagctaatacattaagtaaaaaattatccatacttcatcacctccctttgtagcgttgggaggataatcttttgtgtatagactccactctttttttagaatatagattgctttctcttgctaaaattattataacatatatttacataaaaaaagacttagtttatatactaagtcttttaaaatgcagtattttagaaaatatatttttaaaatataatttattttcaaaaagagtatatttttttataatttaaatgtgctataattataatcacaacgaacagaaaacttttttttaattggtttaaaaaaatctacaaaaaaataaacaaggaacatgtacttgccgtcaaacaaaccatgttccttacaccggaggttagacctctcttaaggataatatatccttgtttttctatacttatatttatattataagacaaagtgtagaaaaacacaatggttttaaggtaattttaatagtaaaattattacaaaaaatcaaaaaaagagcgtcagcctccaggtggaaattggagggataaagatgaagaatgttaataaaaataatatagataagatgtttttagaagaatgtagcgctgaaagagcagagcatgaaaaagaaaattattcaaatttcaatagacatgaaacatatgaaataaaaaaatatataaacgaaaaaaaactaggaattaaaacggctatagccaacgcgataaatggcgggaaaaccctgtttattgcaccgacaggagcaggaaaaagttatagctttataaatacattaaaaaaattaaaaacaaaagcgttattcatacttccaaatgcttcaaatgtggagcaggcaatgcacgagtatgatataccaggagcatatgacaaaatacctgttagcgaagcatttaaaaatggtaacttagttgtaatgacttgggataaaactgaaaaacttataaacacagacttaagtgaatacataattgtagttgatgaaatacatcaaacttatacagatgcatatcgaggaaaagcaataaaaaatctaaataatataatgtctaagtgcaaaggaagaatagacattacagcaacaccaacaaaacttgaatttgaaatatatgactacataatagagtacactcaaaagcaaaaaacagaatataaagttaaattgtacaacgactttgacaataaaaattttactgaaatgattaacataataaataaatctaaaaacagcgccatgttgatgaatgatatatcaacattagaatttataagagattcagtgaacaaaaaagttggagttgtatatgcagatggaaaagaagagaatgaattgtacaatagaatagttaaaaattcagacatgaaagactatgaaacgcttttaaatacaacaacaatcctagctggtgtaaatataaacaacaaagatatcacagatataattattgttaatataaaagatgttggagctataaaacagtatgttgcaaggtttagaaacttaaaaaaagtaaatgtacacatattcaataaatatgaagaagagtgcaatgtatacaaaattgaatggctagttaacaaaaatatagaaaaagcaactatcttaaaagatgcttataacaaagtatctaaacacatgttacagtttgaaacagttggaataaatgcaacgccaattcgcatagactcaaatgtgtactactgtacaaaagataattgctataaagtagataaattatatataaaaagtcaagtttacagcaactattacaatacaagaacaattcaaagttttaaagtgttattagaagaatattttgaaaatgttaatataactgatgctaaagaagttggcacaaatgaaaaagagttaaaagagtacaagaaagttgtaaaagaaattaaagatgcaacaagagaaattttaaaagaacataaagaaattctagtaggttatagacagattaaaagcgattctaagagcttttcactaatgcagtatcataatgatatgaaactaagttcaaaagggtgcttagaggcttacagagcgtatgacatacataatttggtaaagaaaagtaaaagtaatagcatgttagaactatattctaattatgtactagataataagttcgacttagaccttgcttggaaactagcgaatgcagcaaacaaaagacgtggggtaatatttaataaaataaatactttaatatatagagaattaaaagaggaatatccagagtttttaaatgatgaacttattcaagttacagtatttaattatatagataaattgtttggaattggaacatcttataaagaattgcatttacaagagttaagtaacgacttaagaacaattttaggggaaaactgggatttaacaactaaaaagctaagcgttacactgaatggaatttttattatagaaaagaaaaaatatagtaactggcatgatatagaaactatgtttttttataaaaatataaatcctatatcatgccagtttgaaaaaaaacgaatacaacttaataatataaaaagatatataactgtagatgacataaaaaaagatttagaattagacgaaaaagataagagtttagaaaatgctataaaatatacaaaagacaggatgttgaactctttagatgaagatgaaaaactattgttattaaaaggttttatgtagagacaaaaataaatttcaaaaatatttacataaggagataaaaaggatgtttgaattagatattaaagttaaaaataaatatatagtgagtgtgagttatgagttttcagagcttttaatacgagcttttaatgactatgataatttcataaaagatataaaaaataaagataaatttatacctataggcattaatcttggatacagagaattgttagaagaaaattcggcatatcatgagtataatttttattatgatgaagaagttgataagtacttttttgaacttcaatatcaagaacaggatttaagggaggagctttcaaaacaacttttactagaacttataaaaattaatttaccagctggggcagaattaattgtagttgattaaaattgtatttaatcaaaaagaaacagaatcaaaagaacaattagaaatttgcatctaaaaacaaaaagtcagtcgacctggaatatatatatatatatatattccaggtcgactgactttttgataatgagtcatcaattaaaataaacataattagcatacaatatttaaagaaatgctataaaaactagaaaacagaggttattgagtaaattagatgaaattgaaaaggcatttttaaacaatgaatttgacataggatttaaaattgaaaaagaaatagagttagtagagcaactagaaatttgcatctaagaacaaaaagtcacgcaagtaggatttaatatatatatatatatatattcctacttgcgtgactttttgatgtgaaaatataaaacttataccaaatggaaaatcgcaaggttaaaaaaattgaccctgaactttcctaatgtaagaaaattcaatgtattttgaattggaattattttccactagcaaaatttgataaaaggtactattattgtagtataaatgtttaattgcgacaaaaaatcgtacatgtgttcttgtaatatcgaacaaaagggggtataattaaaattgtaagttatttttttacaaattttaagaatgtattattctacttgcatatagggggatgatttggttgaaagaagaaataaaagaaatgttggacaaagtaggggataaggatatattagagattatttatctgtatttaaagcaaaaaactaaaaaataaatatgtacatatgaaaagactatcaaatttaagatgatagccttttattctttttgaaataattctagtagcttttccattgcctctaattctttgtcatttaacttgctaaattttaacattgctttagcaagacgttcattcttatctattgcgcataagacttctgctgttattaagttattgtttgaaaaagtatacatatcgccttcgcctgtttttagccatttttcgtttaccttaaatgttgaagttattaattttaaatcactttcttttattcgtgttcttccactttcaagattgtaaatttcgtgtctagtcattcctagcttgttcccaaattcgatttgagatagcccctctgcaattcgcaagtctctaattctagtattcattttaaaactcctttcatagcttaattttacagtaaagttgcccgtaagtcaacgcaaaaaaacgcattggggcgtagtcttgcgaaaataaattagtaaaagttattgacttgccccttattacgcactataatataaatatattcgcaataggagtcaggaggttgtttctatgactagagaagaaagaattttaagaaatgcaattttgtacttagatatgagtgaggaaaagcaaagaatagttgactgtattttaaatgcaaagacaatagaaaacattgttgagaatgatattttagatgttaataaactaaatgaagcagtaaaagaaatagaacaaattatttgttaaaagcgtactttgacggctacgctaaaccaattaaaaaaagtaaaaaataaataaggaggctggaaaatgataaaagttattttatgtagtactatcgacgagtacattgaatatgaagatgtaataggagcaaaagacagctatttaatggatgttatcataggtggcgaatgttcagaaattgatgctatagaaactttagaaattttaaaaaatagtaaagcgagaattgtatcagaagcagaaaaaacttgtttaaaatttggtattggtaatcaaatttcaaaggcgatagaacaaggtataaaagagggttcaaaactaaaaaggaggatacattgtgataattgcggggcaatcgtagacagttcggaagaattgacctcaatgccagttttagaaaattataacaacaatcaatccgtttctgaccaactaggaagtatagatgtatgcccaaattgtttgctagaaataacagacttactgtaattccctgttttagttgaaaagaaacaaaaagtaacagcgtaagccgtcaataaaaagaaggggggtttaaaaagatgattaatttagaaacattgtgtaatggagaaacaaaagaaaagattgaaaatggattcatggagatatttaaaaacatacaagaccctaatacaccagcgacatctacaaggtctttgactgtaaaggttacactaaagccaggtaaaaatcgttctcatgttaatacgcaaatacaagttattccaaaactcgcaagtgtcttaccatctgaaacggacattatagttgaaaaggattttagaactggagaagttaatgcaaatgagtatggaaaccagttgccggggcaagtaaaattaggcgacttggagagtaaagaaacaagtgtaacagaagaaacagaagtaaaagaaagtgaagaagataatgttcgtaaatttaagagtttaaaagacttataaaaactaaaaaggagtgtttaatatgttaacagatttatttaacagggtaatggaagttggagcaagaaaaatagaaacaagagaaatcaatggggttacgtatacgactgaccccttgattgaggttcatcctagaccagctgaaatagttaggctaagcactttagatggtttaataggatatataaaatcaagtattgatagtaagcttaaaagtggaaaacttatggttcaagttgaaagccctaaaagtgttatattgtgttctgaactacttgaaagtggcaagagggatatttacattgaaagtagagctttattacctcatgttaatttcgattgttcgcttgatgcagagcaatttaacgttatgttgcaatcctctttcgtagatacagaagataagaaactgcttttaaaagtaagcggaaatgtaaaagaaacaagtgtaaaaactgtgcaagatgatggagtatcacaagtagtcacaatgtctacaggtgtagcaagtgtagaggatgtaatcctgcctaacagagttaagttaaaaccttacagaacttttgcggaagtagaccagcccgaaagtgaatttatctttagagtaaaagagggcattgcatttaagttaatcgaagcagatggtggagcatggagacttgaagcaataaaaaatataaaagagtacttagagaagaaattagaaggtattaaaaatatagatataatagcataaaaaattgaagaggctggactaaataaccagcctcttttaaaaaggagtgtttattttgtataaagatataacgaaaatgggagcaattgaacgtggggaatatgttggtaatgttgctcttgaattaaaagaagaaaatcctcatcttagtaaaatagatttaattgagttagctcttaagaaaataagagaggaaaaggaacaggaggctgggcaatgaaaataggtaaatacttaatcgtttcccaggagcaggtggatagaaatattgaatgtttgaaagaagaaaacaaagtaagggacgataagataaggtattatgagcgtattatgagtaacaatgaagaattgattcaaattttagaagaacagttgaaagagtataaaagtgaattagatgtatatagcttgtttatagattgtattttaaataaagaaacaaggaaagcgatagcgatttataacagaactaaaagcattagaattaagcaaaaatgtcttaattctatacctataaaaaagggttaagttgaatgaataatttccttgtaggaataaatgaggtgcttaaatatgagtgaatttgtgcagtgttgttgctgtgaaagaacaataaatatagaagaaaataaccatgtacagtatgaaaaagaggctctaggtttagtttttacactgtatttctgcttaaattgcgtagatgaattaagcgaaatggaataatttttaaatgacgaatggaggtatataaatatgaaaatgaaaaatgttttaaaactatcggcaatgtattgcttttgtccaaaatgtggaagtgatgaacttggagaaggtgaaggaagtttaatcgttgatgagtatacatttcatagaaagtgtaaatgtggatttgacattatagtagatgaaaggaatgacgaaatataatgatttttttaggaatgataattttgattatatttgcattttttattggtcgtatatatgaatatagagttaatttaagagaatgtgagaattgtaaggggggaggttggaaatgaataacactacactaattggtagactaacaagagaccccgaattgaaatatataccaggttctggaacagctgtatctacttttacaatagcagtagatagagattatgttaaaaaagatggaactaaggaaactgatttcatacctattgaggtgatggggaagttagcagaagtatgtgctaataatttagataaaggtaggttagtagcggttgaagggtctataagggttaatctttatgaaaaagatggcgagaaaagaacttatacaaaagttcatactaataaaattaaatttttagattataaaaaaagaggataatgaaaaagaatgtaagttcgagccgggaggcttagacccgcaaggtttccaggctatagacgacgatatacctttttaagtaggtgattaaatgattaaaaaagtagaaaaaatttttagtggttcagttaatctgaattttatggaagatgacctaacttttaaaaattatttagcgttatattgttgcataaaaccggttaaagttcatggaaataaaaaggttttggctagttctactaaggcatgtagtgcattgaaaattagagagcatcagaaaaaagaacgtaaaaaggtaagacttgtaaatgcaaaaacaggtgaaataaaagaaatggctatagatgaagcagaaaattttttaaatgttaaagatttgtaccctgtaattcggagaggaagacctacaagaactggctggtatgtaaaggatgttagcaatgaagaaagatattaaatacaatgttatatattttaattcaagaactttaagaatggataaagaaagttttagcactttaatagatgctagagtttgcaaaaatgaaaagataaaagaatatgaaaatgttgaaattattaaaaagacaattatagaaaaattgatggtataggaagtgaatttatggcaaaaaagaaaaggatttgttcatggtgcggtaagtcattttttacagagtcaaaaaacggattttgctgtaaatcatgcgaaagaaagtataaaaaagacaaagaaaaaaacgtaagttcttgcttagttgaagaaaccaaagaatatttaattgaacttggaaataagaaaagaagagtagatattctaagaaaagagatagattttttaaaagataaagaattttatagagagataaatttcaatgaactagggtttaaaatacattctagcccgaagggcatagatgaaatgattatgaataatgaggataaaatatcatttaaagaaagtgaaattgattttatagaatatagattgagactaatggatatttacataagtgaacttacagaagagaagcaacaaattataaaatttatgtatttttatgatggcgcaagtaaactttctaatgaagaaattgcctcaaagattaaatgtagtcgcagtaatgttcattataaacacaaggaagcattgaaagaacttgccgaaatgctttttgaaagtggaagtcttttgtagaacgaaaaaagacggtttttaagacaaagttagaacactcttttacgtttatatagtgtatgatattaatatcaagaagtttaaatttaaatagatatagatttgaagcctggcaggaatgttgggctttttataatgcaaattaatattttaagggggttgagaaggtgaatagaagtgggtagtaagaaaccagctaacccaatcaaagacaaacgtatggtcttaaatatacaagaatacttaaaagaaaagagtgttagaaattatgttttatttgtcttaggggtggctacgggctatagagcaggggatttagttaagttacaggtaagggacgttagaaatgcaatagacgaaggttatttcttaataatggagagtaaaaaagaaaagactaagaacataagaaagaaaaataaaaaacctagaaaagctccaatagttcctaatttagaaagagtactcaaaagctacatacgagataaaaaggattatgaatatatgttcccatccaggcaaaaatctgttactccgcatataggtgttgagagagtaacagtgatactgaaagaagcaggtagatactttggacttaagcatataacagcgcatagcatgcgtaaaacatacgctcgcaccatatacgaagaaagtggatttgacattataagagttaaggaaatgcttggacattctagtatagaagaaactaaggcatatctaggtcttaatgaagaacaatatcaagaatatagcatgtttttaaatgacctaatagggtgattttttttattttgtctttttgaatgtgggaaaaataaaggcttatatattcaatacatttttttcgctatatataaagtaggaaaagtaaaaagtgaatgtctgattctctaagaaaaccccatattcgttaaaataggcgttagccattataaatactgggatagaagctatttaacgttaaaatgggtatggtgaagcttaaggacatgcggacaaaacttaaaggacatggaaaaatagagaatgagattgatgtaataaaaactataaaattcacaggcaaacaattcaattacgcccttttacaagagtaatgacaatatttataagtacttttgattcatttaaaaaaattcactcgtattcataactgtacggtattgactacgatttaattatgtagtaaaatgaacatatagaaagtagtcataactaatggtcaaaagtaaggggtgtatttttatgatatttgggtattgtcgggtaagtagtaaagtacaaattgataataatagtttagaacagcaggagcaggaaataaaaagacattatagtgatgctaaaatatttagggaacaacatacagggtcaaccacgcacagacctatttttgaggaaatggttaatcaaatgcgtgatggtgataaattagttgtaactaaattggatagacttgcaagaaatgcaacagaaggcattaatcttatacaaaatttatttgatagtggtatttctgttcatgtgcttaatgttgggcttttagaaaatactactcttggcaagttttttataacaaccttgcttgcagttgcagaaatggaaaggaatctaattttagaacgaacttttgcaggtaaggagatagcaaagcaaaatcctaatttccgggaaggtagacctaaaaaatatactaagatgcaaatggaacatgctttagagttattaaaaactaattcttatacgcaagtagagaaaatgacagggattagtaagagtacattgcaaagagcaaagcgaaaacaagaagactagatacctagtctttttttattgaaaggagttgatttgtatttcaataaaaaattccaatcgagaaaaagcgtttgagatttacaaagagaaaaatgggagaataaaattaattgatatctctaaaatgttagaagaaaaaagttgcaatattagtcgttggaaaaaaattgatagatgggattatagacttggaataaataagaaagttggcgcaccagccggcaaccaaaatgctttagggcatgaaggaggcgcaccagtgaataatcaaaatgctagaactcatggatttttctctaagcttttgcctgctagaacttacgagattgttaaatatatcgagaaggatggtggtaattctttagacattctttggaacagtatagtagttcagtatgcgaaaatattagattcttttaagattacccatgtcaagaataaaaaagaccatacaactgacattaagaaaaatggtaataaaattaaagagtatgaaattcaacactcttgggataaagttacaaatgctatgaaagcagaggcgacagcatttaaagctttgtcaaaaatgataaaagactatgaggaactacttcataaaaattgggatttagcaacagaagaacaaaaaaacagaatagaaaacataaaagcgagaacaaataagttgactggtaatgacttagaaatagaggatatagaagaaatagaggcagaaatatatggcagtaactaagaagaaaactataccttttttatttggagataagcacaaagaatatattaaaaagtgcgctatcaatacatacaatattgccgaaggtgctgtaagggcaggcaagacggtagacaatgtatttgcctttgcgcatgagataaagacatctaaagataagatacatctagcaacagggtctacaagtgcaaatgcaaaattgaatattggagatgctaatggttttggacttgaatatattttcagagggcaatgtcattggggcaaatttaaaggcaatgaatgtttatatataaaaggtatttcaactaagcataagcaaaagattgttattttcgctggaggtgctaaggctgatagttataagaaaataagaggtaactcgtatggtatgtggatagcaacagagataaatctgcaccatgataatactatcaaagaggcttttaatagaattatagcatcaactaatcgtaaaattttttgggatttaaaccccgataatcccaactcgccaatttacaaagaatatattgatagttatatgaaaaaagatagggaaggcactttactaggtgggtataactatcagcactttaccatccacgacaatataacagtctcggacgagagaaaacgggcaattatatcccaatatgacgagggtagtatctggtacaagagagatatactaggtcagcgctgtgtagctgaggggcttatatatgaatactttgctaataataaagagcagtttaagactgaaacaattgacccactcatggatgttattgttggggtggattttgggggcaacaaatcatatcatgcttttgttgcaactggaattacttataactataaaaaagtaatagctcttgcaagtgaaagacctagcgcagataccagtccagatgagttgaatgctttacttataaattttataaaaaaagtaataaatctgcatggtaaagtagattgtatttactgtgatagcgctgaacaggtactaataaaaggcattaaaaatgcagtagaaaaagaaaatttaaatgttagtgttagaaatgctttgaagaacgctattaacgataggataagacttacagacttattaattagtcaaggtaggtttgagtatacaaggtatagcgagactcttgttagcgcattatgtggtgctgtttgggatagcaaagaaactaatgaggatgtaagacttgatgatgggtcaagtgatatagatagtttagatgcttttgaatatacgatagagagatacttgaaaaagtttataagaggtgactaaatgtttgaaggattgaaaaatgctataaggggggtgattaacaagttgtttaataagagttctatacaaaatgaattaaaggtagatatagctgttagtgataagatgtcaagagcaattgacttgtggatggctatgtacaaaaacaaagccccctggctaaatgaagtgactaaaagtttaaatttatctgctacaatttcaagtgaagttgctaggcttgttacccttgaacttgaaagcgaagtagtcgggaatgactttttaaatgaacaatatcaagacgtattaaaagatataagaaagtattgtgagtatgcttgtggggctggcgggctggtatttaaaccatatgtaagcggaaacaaaatagaagttgattatgtccaggcaagtaatttttttcctacagaatatagttctacaggcgatattacatcagctattttttcagaaataaaagttaaaggtgatattaaatacactagattagaatatcataattggacttctacttcttatactatctctaattacgcatataagagtaatacagcaaagttgattagctattcagatgatttagggaagggaattaaattaagtgatgttccagaatgggcagagctttcagaagagttagtgttagaaggaattgaaagacctttatttgcatactttaaaatcccacaggctaatagtttagaaaactcatcacctttgggcgtttctgttttttcaagagcagttgacttaataaaagaggctgataagcaatattcgaggattttgtgggagtatgaggctacagagatagcaattgatgcagattctagtatgttcagaagaaacgcaaatggagaatatgaagttccgcatggcaagaaacgactgtacaggatgttagaaatggaggatggagacaataaatggaatgtgttttcaccagccataagggattcaagccttttcgctgggcttaatcaactactaagaaaaatagagtttaattgtggattgtcatacgggattatatcagatgcacaagagactgaaaaaacagcaacagaaataaaaactagcaaacaacgtttatactctactgttaaggatatacaaaagtctttagaggacgccctagagggattaatttattctatagataagtggtctattctggcaggatttactcctagtttgaaatatgaaacgactttcaattgggacgatagcgtaataatagacaaagattctgaactcttagcaatgcaacaggatgttgcgtcagggctgattagaccagaattatatattatgaaaaaatatggagtcacagaggatgaggctctgaaaatgatgcccgatactagggaattagtagaggataatccttttgacaagggtggtatgtagatgttaacatctaatgagttacaagaaattcctaagtattttgttagtttatttcaaactttagaggactttgtaatagcagatattgcaagacgtattgcaaaggctgggaatattacagatatggcagaatggcagttaataagagcagaagagattgggatggctgataaagtaattaaaatgaaaattgctgaaatacttgatatctcttttgaggcagttgacaagttatttgaagaaaatgctgtaaagtctattgaaagtgatagtgctttatatgaacatgctaaattaactccattgcacttgaatagttctgaagaacttaagaactatgtttcttcagctaaagagcaaactaagggtaaactgaagaatatgacaggtacattaggattttgtactattaaaaaaggtaaagttattagtaagaaacttacagacatatatatagagtctttagacttagcgcaatttcaagtcagtacaggagtcttggattataagacagcagttaaaaaagcagtcaagaggcttgcagatagtggtttaaggtttatagactatgagactggttggacaaatagaatagatgttgcaactagaagggctgtgctgactggtgttaatcagatgtcgcagaatattaataataaagtcattaatgatttggatactgatatagtagaagttacagcacattcgggggcaaggtgcgagggagcaggtattaaaaatcataagaaatggcaagggaaatggtatagtttgagtggtaaaagtactaaatatccttccttaaaagtggttacgggctgggggcaaggtgatggtctggggggctggaactgttcgcatcaattccatgcggttattcctggcatatctgttcctgcctactcaaaagagcaattaaaaaatatagaccctcccgatattggatataaagggcgaacttatacgcattaccaagctttacaatatcaaagaaaaattgaaacatctatgaggcagacaaagaggcagttaatcgcttacgagtcggcagggcttaaagatgagtttacaaatgcaagtataaagttgcaaagacagaaacaagagtatagagagtttagtaagattgctaaaatgaggttgcagaatgagagacaccaggtttttggatataataaaagcgtcagccagaaggctgttcacgctagtaaaaaggagagaaaaaatgggtaaatatagaaagaaagcaattattgttgaggcttttaaatggctaggaagtgtagaacaaaaggaagaaccgacatggatagttgaggctattaaaagtggtaatgtttggattgaacaaaatttaggggaattatctccacgcatgtatataaagacgcttgaaggtatacatgaggctaatgtgggggattacattgttcaagggataaaaggagaattgtatccatgcagggctgatatatttagagaaacatatgatgaagtcttatatcgataaggcttatttttatgcttaaaaatacttaatttatttatatagatgtctactaagcgacgtaaaaagttagacaatacgtgatgctaccacgtaaaaaagcgtagttgtaaacgaaagcaggaggtttttatgaaaagagagtttttgaaagatttaaatttagaggatgaggttatagaaaaaatcatgtccgaaaatgggagggatatagaaaagtataaaaaagaagtagaaaagaaaaaagaagagttggaaagcaaaaatactgaactcgaaacagctaataataaaattaaagacttagaaaaaatagatgttgagagtataaaaaaagaggttgatgactggaagagcaaagccgaacaggctcaaaaagataaggaattgattgaaaatcaaatgtcagagcaaacttataacttaaatttagataattatttaagtaattttaagttttctagtaatctttcaaaagaggctgtaaaaataaaaatgaaagaaaaaggacttgaatataaggatggggcgtttgagggagcagatgattatataaaagaattgcaggcaaatgacccaggggcttttataagtggcaatagtgttccaaagattgttagttctagcggtggagatgctggagagtctaaagtaagtttaatggaacaaatgatagcaaaaaatagagaaatgttgaacatataggaggtagaaaatgagtttatttgattcaaaaatttttaatggagaagtgtttggaaaatacgttgagaccgtacctaatctaaatagggacgaattaataaggtctggagcaataagaagaagggacgatttaaaggctatgttttcagcccaatcgggagcaaattatgcaactattccaatgcttggcttgattgatggcgacccagtcaattacgacggacaaacggatatagtagcaactacaacaaagaccttttcgcagtctgtaattgttgttggtagagctaaatcgtgggtggaaaaagactttagccaggacgtaaccggcggagttccttttatggagaatgtaggaaatcaagttgctaaatattgggataatatagaccaaaaaactttgttagctgttctggaaggtattttcgcaatgacaggggcgaaaaatttagaatttgttaacaatcatacttttgatataacaaaagaagcagaaacagaaaatcaaaaggttaaagccgaaactcttaatagtgcaactcaaaaa
